United States Patent Application Publication US 2006/0154250 A1 - sequence listing, part 4

SEQ ID NO: 377 - DNA, 138115 bp, Mus musculus
  misc_feature (1)...(138115): n = A,T,C or G
gggcatctaatgtctgactctagccagacttcagactcctgggcacagctggccacaaaaggaaaggtgcaccagtggggcctggggcatgtctccaaggataaagtactcacccacaagcacagaccctcccttcagatttcacataaaatccagatgtggtggcatatgcctgttaacctagcagtggtgactggaaacaggcagaagagactatgcctcaagaaataagagtatggagaaagacaacgcacccaacatcaacatctgactccccatatacacacaaagatgagtacatgtgcacataccacacacacatacaaacaaatacaattcatacacatacacacacatagacacatgtacacacatacatacacacatatatacacacaaatacaattcatatacatacacacacacatatacatacacacatacatacacatacacacatatacatacacacaaacatatatatatataaacacaaatacaattcatacacatacacatatacattcacaaatatacatatacaaacacaaacatatacacacatacatatacatacatatatacctatacatacacacaaatacaattcatacacatacacatatatacacataatatacacacacaaaaacaattcatacacatacacacatacacatatacatacatgcatatacacacatacacatacacacacatatacatacacacacacacacacacacacagaggacagaatggtcaagaggaggtagaaatagcccaccttttcacctgatgcccacacaatcagccagcctctgtcctatccctacagcaatagtccttgctcctaactctgttgagggaactccagtgggccttgcctccccagctttccaaatagataagatgacatggaagttattacagaaccctcagacttggttggtggcccccatcctctagtgtacaatgtcccaggagcaggcttctgccatatacccacacatatcctctgtgcctgagttgccaaatggctcgtgcttgacatccaggaagtacctgtgaatggactcaggagagatcactgggaggtcactgtggaacagtgtttgacagccatgtctgttgatgcgatctatgctgtcactccaacaaagccatgacatctcactgaccttgaggatttagctgtaagcatacattcttctataggaagaaaagctggctccgagaagttaatgaactctctctcccaagcatcacacagcttggaagtggaaaggatgggtttcagtctagcagagcaaaggtggagtgtgctctggaatcactttgctggacagtgcctgatgatcctctagtgtgccacaccctctgagatcttgcgtagctcttcctggttcaggcagcttaagaatcagataatccaccacattgcttctgcaggcagtgagcagcatcttcttttgagacagtgacacactagtgagctgtggtgagcctcacaactccaccctgaagctgagtcggtaatgactcgggagcctagtgatgtgtcccatcgggaggggcacacctggtcccagggcagcatcccctcaggtccagcaccagctcctgtgatcacatctcctcatttcccatgcagaggctttccaaaagcttggatgcaagtgtggctgtcactgtggacacagacacgtcctctgccagcccaggcccaggtgtaaacaggaagtgtcattggggcgcttgcattgtgcagggggcagcttgagagaccacggccttctgcgggaatctagccaatgaaaacatgtttgcaaacccctgactctggtcggtgggccaaggcaagcagagactcataaaggagatttagggcaggaaggtggcatattcatttgtacctccacacagtaaaaataatttattggcagctgctgggagctttagtctgaaatcacatggctggcaatatgaagacctttctttctttttctttttttctttccctaacccaagtagcctggactttcagatgaagagacatcattgaatttgtagtgtgtttttgtgtggatgcatgtgtggatgcctgtgtagatgtgtacaaaatgtgcatatgtatatatgtatgtgtatgtgtgtatatgcaagtgtgtggtatacatatatgtgtatgtgtatacatgcatatgtctgtacatgtgtatatgtgttttatatgtataacttgcatttatgtctgtgcatgaatgtatgcatgtctctttgtgcatgcgtagttcatgtatgcctctgtgtgtgtgtgtgtgtgtgtgtgtgtgtggtgtgcatgtgcatgcttctatatttctttatttacaggtgtcttccttcactgatgctacaggcctcaggagtatttcctcagaggctgtggtaatgagctcaccagcgtgccatttatcacccacttgtggcaaggggagggggaggagtctcagaggcaaaggatgagttgtggatagggatgtctttcatctgctggagacccatttgtctccttaagtgcctgtcccacagggacctgggtaggagtttgtggagaagggtgagggctgggactgagcagatatgcagaggttgaagcaagagaggccaaggaaggaacccagagaaagatgaccctggaggcaaatagggtgttgagatttaaatctgcctggggccagggaaagaaaaggccaggagatagcagggaactgaatctgaggcagccaggcaggtattcctgctgacatcagttgatgagcctgcatgtcaaaggttggcacataccaggctgccattttccaggagcatcagcagagatggggtctacccctgggatcaatttgaaaacacatgttgcttttgaagagccatggacccagactgcagggcttgtggccattctgtgtgatgcaaggccacttcataactccactgtttgtacctctctctctggaaagcctttccttgttaattctccctccagccaccctccccctcccagcttgcttctccggttttaacttctgcaactggtttggaactcagaaaaggcagtttcaatgcagactagtgtggtgtccttgccagcatccccacccccacctccgtggaatgtaagcaggtgccaacataaagattttcggtgccatgtcctagtgggcatggctctcatcatgtgtgggagggtctccagcctcaacagtctctgacatctgattctcattggctcagaccttgcctgtgatctcccagtgacaccccccccccccagcctggttatcttggcctttgcttcttcatgggaagtcgagcctgcttgcctgcagaaagccgaccagggctttgagaatcctgtgttctctgttgtctgaagttctgtccttctgccatgaagacaccataatcaacagaagcaggtgtaaaggaaatcccctttagtgttttccagggggaatttcatggacagatatgtggctggacttctgccaacccctgacctatcttttaagattctttcatttgtttgtttgttttggagtgcatgttgctgggactattaggcaagttgagcctgggtcctgtgctagagtctgacaagactgtcatcttacacggtgacctttttgggataatcgagttaagaatctattgatttcaaaataaagagaaccccagtgcaaaatgatttaatcagacttgagcccatggctacacattcagcttgtgggtgtgtgtgcgcatgtggagtgccaacatccatggccagggtcttccttcctgccttattttggcaacgtggtttctcagtgaacctgaagctcagtgttttgactagactccctggccagtgtgctccagggatctgcctctctctgcctgcccagcacaggagtgcagtcaggcaccactatacctggacttttcattgggttctggggaacacttacctggaaagcatttgacctgctgggccatctccccaagtctcctgcatttcggcttttaaacaatgtattctaggatctaggtgtactgccacagtcagatcatcccaatattatggaggctgagccaggaagaccgtgaattgggtgcaagcctgcgaaaatagagaatctaagaaaaggaagagaagggaaattagaaagaaggaggaagagaaggctgacagggaagattgtagggtgtgcagggaggcatgaagcagcttgtgttgggacttcccggtactctgggttgcgtccgctttctccctctgcggcctttgttttcctttcctattgtgtatgcagcattgtcttgtctgtgacatagaaagagctagaaagtgtagggttagatgttcccggggtcttggtggtcttgggaagagggaacaggcacgggctctaagccagcatgtcctttggcctctgcagcctttagccccgaggaaattctctctggggcagcagtccaggcagatccggtgatcttgcctttggaaagagggcaaagcagccagaggcaggctgatcaggcttcagggcaggcaggaaaccgaacagtttcaaacaccagggaaacacccgaaacaccagaagtgtccatacagcttgtgtggctctacaagtgtcggtggcacactcctgtcatcccggcaaactcacctggcctctggttggtgcgcatggacattaagtcccttcactcccagctgggcacagggctggtttccatgtgttggctagagtcagtgtcctgctttttcagatgggtgacatatcttgagtttttctccctatttttcctcccctacccttctctccccccattccctcctccctttcatccctcactctgtccccttcctctctctccctccctccctccctcccttcctttctgtggttcctatggtgtcaaaaatttaacctagtgccttgtacatcgtaggctatctgtcttctactaagctatgtttccaacccttttaacaatttctttatttaaaatttgaagtagagcctctgtgagttgcctgggctggctttgaactcactctaaagcctaatctataaccttagacttataacctaaaacctataacctttctatcggttcccccaagaagctaggaagacaggccagtgccactggaccaattagccatgagatttttaagacaggcacttgaaggggactagacccgtcatggaaaggcagctctgagcagatggaactttgcaatctttccaatctctggaaaccaatgttgaggccttgatgaagaaaaggctcaggatgaggggttagtcaaggatggagggcctactggtctcagaggcctccctctctgaacacattcagaacttttgggggtccaaatccatggtatcccctcaacaaacatcttcaatagcagcttctttccattagtcacaggctctatctcctctacgaatttctgaaaggtcaagaaaagaatgtgaatccaaagtccaggcatacagagaagcctgcaagatgagcaaatcatcaacagactcagtggcctgacccatgacctctgacaccaacatcccgttaaagacagtgatctgggctatgtctgggatggcaccagtatccttcagagcagccatccttggtctcttaaactttatcagattagtgtgcaatgagctgaaaaacaactttactagtcaatcatattgattaacaaccaactcagacagtgtttactaaaacccatgagggacccatcctattacagatgagaaaattatacagtcactaaagcaagacatgtctgctcctctccccacccagtgctcattccacacaagcaatgaaagtaaagactataatccctaaatgcacagggaggggtaggagaaggggaaagggaagggggaggaggaggaggccacagctaccaccctcagctctgagaaacaggacccagagcctgggattcggttgaactaaaagaagtctgatcattagagaccaaaagaaagatagaaaaagacgtgtgtgtgtgtgtgtgtgtgtgtgtgtgtgtgtgtgtgtgtgtgtgtaggagtctggcagctgcatctttctacctgatcaaaatcaactctaaacaagcccaaggttgaatgggggtggaggacatttgtacacttaattattcatctggaataaaaatgaattctgcaacagctttgagggacagcaaggcaagagcaattagaagttctgagatgcacgcaaatgtttgaatgaacaatcattataataagtacattaaaataaaaacaagtcagagggttgtatttgcataaataatccaaggtgagagtgttggattctctaagaataaaagggacatggcctttcaaagtggagaaattgtaaccgatgtataggtcagtagagacagacagcagcaaattaagacaaaacagtttggaagatttatttgtgcctgtgtgtgtgtgtgtgtgtgtgtgtgtgtgtgtgtgtgtgcgcgtataaagccatggctgtgggtgcacagacttctgcattcacagggaggctaggagaaagtcttgagtgtcctctgtcactcattccctattcctttgaggcagggtctttccctgaacaagatactcattctttcttggctaagcaggacattagcaagccctaaggtactcctgtctcctccctgtaggacctggcattacagattttgctgaatacctgaattgttatgtggatgttgggatctgcagtcctcttaactcctgagccatctctccagcccctgggcattggattaactagtctcttattctcccccctactttgagtgaataggaagaatcttccataattttccagcatattcaccctcaccaaatacccacaaggtaaacaccatcatatctgtgttccagatgaggaaggaggtacaatgagtcggagtcactttgtactgttatctcagttgcttagcctctttgtgtctagtctcttcttggttagatctactcttcctgcttccctgtgtccccaagctttagggacacagcatgagggtcctgctctggggccctgcactctgtgaacatcttcaagggatgtgatgcaaggttgggtgcccagggatttgttagtttgttgagacagtctctttgtgtaatccaaacttatctgtacctaattgagttgaccagattggttggtctaacttgtagccctccccctgcacctgccacttcagcactgagattacaagcatgagacattgtacctattattattattattattactattattattattattattaaatgttttatcatattcttttcctctcaaatcctccaagatccttcctacttccctactcagacaacttcatgttctctctctctctcttacttgctatctcataaaaaaaaaaacaaaatcaaattaaaaatgacaaaatgaaacaaaaagtacacaaacatacaccacaaaacaaaacaaagcacatgtaatacatttacattggtcagctcttcctgagcacagcattggttctcagcctccctagtgctctataatacagttattcatgttgttgtgatctccaaccataggttacttttgttgctacttcataactgaaattttgccactgttatgaactataatgtaaatatttttggagacagaggtttgtcaaacgttgagaaccactggcacagggccttctctggattgtggctaacactcaattggagaaaactggtttcccctttcccagcaggtaccaactgtaaatagcatcttgctggggagtgggaacttcgtgttcaccctccattctcagtgctgggatttttgtctgtcttttgtgatttccagttaggatttcttttcacaccgtagtccaagctggcccaagctggtccagggtttgtgctgtagactgatattgcagcggcaatcctcctgcttctttccagctgcacagtggtaggatttgtcattcttgagtcagggtctcaggatgtagctcaggcttgtccagaacttactatgtgccctgggttaaacatggatgtccagtgatcctcctttctctacccaagtgctggaattacaggcacgcaccaccatgtcctgctcctagattgtctttattttgttgttttgtttttgcttgggggttggagatagaggatttgaatacttcagcagggagaaagtgaggcctgtttgcctcttactacactgatagacagatttataaagtagatatggcatacatatacagtgatattatacagaatttcctaaggaaagattcttgtgatgtgcagcatcatggatgaaagccgagggcccagagagttggctcagcagctaggagagtttgctgctcttcaaatgacgctgttctcagccctcatactggaaacaccaaaaccacctgtggctccagccccaggggatctgatagcctcttctggctttcaagggcactgtgctcgtgtccacctaaagcatatacatacgtagcacgttccaggccagccagagcttcatagtgagattctgtctttaaacggagcgggagggggaggctgattaggtcggtctcataattctttccatgttttggaaaccttactcccacaacaataaaataaaaatttcgaaggagaaaatacagggaagctggtgaggcaggactgtggtcactacagaagacagcgcagactctgagggatggagttcccaggcctctggaaacgcctgcttctccttcaccctgcctcacacagatgctctagaagctgtcaagtgcctgtggacaattcattccagaaggcaaacatcctccttctctcttactttaacatcccgtagcggctgagatgggggacggtggatgtgggcaccctgagtccctggtgccatggtaaccgcatctcttgaggagatggttgagctatcctgagggcagtgccagcacctgatatcaacaattagctggaggagctagaaagttcagagccagcctggcccacctggggagacttggtctctgaataaaaaagtgaaataaagcaaaatttgaaaagggctgtggaatatgactgctcacgaaaactccatgacagggcactttcccgggatgggtaggtccatggtcttgagcccagtacagctagggaagtaaaggtcacaggtttgcatttttcttgagactcattgccaggcttgtttggcactgactgcactgtggataaaaatcaagttaaattaaagtaaattaaaagataacaaggcacgctgtcttgtttatggacttgacagcggcccaagcctatcttctcttataggcacagatagatttacttgcccttaggcagtgtgtgcatgtataaaatgtatgcaatatatataaaatatacacaatgtagacagcactggtccatatcgtctcctttatgctttgatcctgaggattccagctctactgtattccaannnnnnnnnnnnnnnnnnnnnnnnnnnnnnnnnnnnnnnnnnnnnnnnnnnnnnnnnnnnnnnnnnnnnnnnnnnnnnnnnnnnnnnnnnnnnnnnnnnnnnnnnnnnnnnnnnnnnnnnnnnnnnnnnnnnnnnnnnnnnnnnnnnnnnnnnnnnnnnnnnnnnnnnnnnnnnnnnnnnnnnnnnnnnnnnnnnccagacaggagagtggaggaggggatcttggagaatcgcagtcactgtcctggtcactgtgagcgtggagaggctgtcttgtgggagcagagtgggaagctagtactcaaggagaaaagcatttccacagtccgagccaatgagagagaagaatggcagtcttggctcgggcttctccacctgccaccctctcggggccagcctgcttaccagcatggctcagtgacaattttctgtttctctaatcctccaggatggctacttctctcaccgtcccaaagagaaagttcggaccgacagcaacaatgagaactcagtccccaaggactttgagaatgtggataacagcaacttcgcccccaggacccagaagcagaaacaccagccagagctggcaaagaagccccccagcaggcagaaagagcatttgcagagaaagctggatgcccaggacaaacgacagggccagtcagtcctggggaaaggccccaaggaggtgctgcctcctcgggagaaagccacaggcaacagtagccaagggaaggatctctcaagacacagccatgccaggaagagtggtggtggtgggtcccccgaaaccaagtctgaccaggcccccaagtgtgatatctctggcaaggaggccatctcagcactgacccgcgctaagtccaagcattgtcgccaggagattgcagaaacctactgtcgccacaagctggggctgctgatgccagagaaggtggctcgattctgtcccctagaaggtaggtctctttctcctgtccctggccccatctctctgccttctcaggccctctgaatatagccacactgcacctcaaaccctgaccacaagatctggtttgtctgggaactctgaactcctgccgtctgctatcaagaaagtttgacaaaatcatgacatgtgatagtatcatatgacctgttccctttagcagatatgatctcggtgtctgcagatgtgctgtgctgtgttcatagctatctggaatttacaggctacagaaattagaaaaaaattagactctgtcagacgtaggctttttacgtatgcaatattgtacagccccaacattacataaaaaattataagtcacccagagattatttgaagcatagaggaggatgtgcaggatataagcaaacaccataccatttcatctaagagaaaggacactgttagatatgggaattatagggtctggttcccaaatccccatggatcctgagggacacctcttcatggttctatgtatccatacagtttattagacgggttgtggtcccaagctccaagtgtcccaaggaaagatgggaaaggaaggctaacatggccttcacacattccctcttagtcaagttcagcgtgaccttttgagcttgtagcagcaaatatgcatctatgcaacacttcctgttcaatagacagattttagaagattctcccttcccaagcctccgtgtggtccaggtggttcctgtctgtgttcttgattgcacttggcactttgtgtgcagcaataattaagtggaatgcaatgtttccaagagctgttcttagccagtgccaggcaggggcattttggaagtctgaaccaaggtaatacggctcctgtcacgcttagagcttgcatgcttgctccctgaagggccaagtagcaaatctgtatggtcattgggctgtatatctttatcacagatcttaagagacaatacacaaacatcaatgcacttggttaggttccagtggattcagactgctttccagattgcaagaggcttccatccagggcatctaatttaaggtagaaatttcatgaagtcaaaaagacatgcaatacatctgacctatggaatgttgtagtatagtctggtccaccttaaatgtgctgagaaagtttctgagcctatggttggtcaaaggcaacaaaaacaaagcttagattaagacaatgtgttgactgccttgtgtaaggtagtaaatgctgcagtgaaagggggaagcaggatagtgctgggatgaattttcgttcccaatgttatcaagttgaaaagccgtacgtcatccatcattacgctaagaatcatccgtagtcagtgctgttctatctccgggaatccttttctgaggaagctgaggctcagacaggtttaggatttgggtggaggcatccacctaacagacagcaaagccggtattggaattcaggatgaagagtctgagtctgcttccacaagtttgatagtcttcaggggggaaacagattctcacttcagcttgagttatacaaaccccaaagaaatttagctgcctgagaggtgtgcccccttctcctcagtacagtctgaaggagaagggagggtgtcagctgaggaaacagggagcctgtggcaataatgggggggcatgtgtgccagactggagtgcctgcatttgcatctcagacttcctctgcaagctctgagattttcggcaagttgcctgccctctctgtgccttggtgttgtatttattcatcgcagagggtttaaagactgcacagttaagtgaatgtacctggtcactgctgcacattacgcagatatgagccttaacgcttactccacagtcatccaccaccgaatagcagccttcagcgtttcccgtgcttctcctgggtcgtgctgaaatgtctgcaagctagcgtgagctcactggggctgcctgcggggttggctgtctctgccttggcgaaggtggcatgccctccagggacctccaaactggttaatggagttggcatttaagacacatggcacaccagacccacgatgctttaatttcctgcaccgtggcctcccctttgcagtaaatttactgtgaatagactaattgcaaaataactctaattgggtagttatcaatgaacaacttcccgtgaaacagaatggcttacaattaatagcatttaagccataaactattcttctgcgaaaagcagggatgtaattacaccccacagggagattgccttcccttctggaaaccatgacacccggaattccgtctgctctggagggatgggctttggcctagtggtccttttttatctcttgcaaaatgaggaaaagaggcacaatagggggaacacttgacatcagacaatataggaacctcgctggtcctccccacacagaggcatgcactgggcctcacccagaccgtagccactgaaggccagttcgtcagagcctagggacagatccagaggaagggaagttcattttccatgttgacttttgtgaggagctttgtttctgtgtctcctctgctttgcctgtctctcagccttgtccccactcagcccaggggacactctggaaaagactggctccctacagggccattcttccttttctgacctttgatttctgcctcctgtagagaataatcttgaaataagtgaatagaagtcttcctccattccatttgaagacggctgttacctgcttgcacgtatacaagggcagaagactcctatagactgtctaccaaggaacatgcagagagagagagattcttaagggttttgtggaaagacctgtccttgagtatgacctcagaagaagttgtctccagatccccagcaaacccttcctcccaaagataggacactcactgcagccacaaagctgatgcgcacacacacacacacacacacatgcgtgcacgcgcgcagacacacacactcatgcaagtacacatgtgcatgcacacatacatgtttatacacaaaaatgcatatacacatgcatgcaaacacacatacacatacatgctcatacagacatacccacacacatgaaattgtatgtgaattctcatatgcatgtatgcacacatacacacccatacatatgcgcgcgcgcgcacacacacacacatgtgctcatacacaacactcacagagttgcatggaattcctgtccaccctttggtctctccaccttaggagtcccaagtcaccctgactgatccttcctgtgttttacggactataactccacaagtgtaacaggcaagggcatcttgaactggaaacaaagaagaaaggtcgtttttaaatcgagatcatgaaagtctagggctgaagccacacccctgcctttacctcattcccaaatcctctggagactcagtctcagccccttgtggtagagggggcctgccaaagcacaagagctcatggcacagaggccaggaagcagaggcaaagtctgagctaagggggaaaccttcttcttttctttagtccatcttggtctgaagcctataggatggcaactcccacagtggggggcttgctttcccctctaagctaatcccacctggaaatgccaccaaagacacgcccagaaactacttcccttgtctcctaggtgcctctcagtccaatcaagttggctataggatacatcagcatatgtgtgtctcagggagctatagccaacagccccccaaatctccgtgccccccccccgccccaggacagttctactgagatttttctaaggcacttggctgttaaaactgagaagaaaggcagctggctttctagaaagctaacatcaaaagtgacccttctgcctccctcccgcctctgccacctcctccttgccccagagatgtccagctgctgccccttctggagcggtaactctcctttaaaacttgtctctcgaatgtgttggtccctaagtgatgtgcctgaaaaccaagctgaagagcttgcgcaggaagaggaaagcatccctgacaggacacgcaggaggcctttcctggttgtggtcagacacatcttctagaaacttcccttatgaataagcactcctcaagccaagtgtatttttaaacaagaggatcatggctagccgggggttttgcttgtgcgctcgcaatgacctctgtagaccagcggattgggagcaggcgtctcactctgcgcttatgagctgcagcttggagcagctctgcctagagagagcctgactaatcggcttcccttttgttcacggccggaaggggattttggaaccggataaagctcctgcatggctgggaggcagagcaggcagggtgctttgctggcctggagcacatgggtgcctgtctcctcttgcctggctacttcgccccatagcacaacaactctcactcccccggggtaaccatggagacactagcatctgggacccttttgccaggaatgtcacaggcagtctgagaatactggtaatttgggtttacagttggcaagcttcttttttcataaatgtgaacaaaattgttgattcttctagcacctggcactaggctcggtgttcatcaagtatctattgctattgagcggtttgagataagggaatgaaagaaaccctagctcacatcctctggctttttcacaacccagggaagagggtagggtacccgaagaatgccctggaaactcatcttgaacaagaacattgatctcttcccccagcacacttcaatgttacctgtttcactaagtcaaagtatgcactgaacagccatgttgactgtgtctcttaactatgacaaaactgccagaacaacacctcttaaaggaggcaaggtgtctgggctctgtttcagaggttgtggtccctggtcacttggcttccttgttttgtggctgtggcaagacagggcagagcaccaggacaggtatgatgggcattgtgctgtagagcagagctgctcactcatggcaagaagaatgcaaagtcgggaaggtctggggaccagatatacccttcagagccatggctctagtgacccatccctttaaaataagctgccttctagttcccatcacttcctaacaacgccaccaaaagatgcatccatccatgggttgatggattaacaagagcagagcccttctgagccagtcactttcagaaagttccacctctgagcatagacagaactgtagatcaagcttttggtacatgagccttttaaaagaatattccatgtccagtccccaacaagcacccatcatacattaaacaggaggccacatgggagatgtggtggatgagagaaacatgactgatctcatgacactcacagtgcagggtggggatgggagacaggcagtgaaggtgcaggctattatgcacctggcatcaagtagggtagagggaagaactgtgagtctgacagaagtgtctccagggcagataggtagagaaatggtcgttgggtataaattcgttcttccttggaagcacctgctaagaatgttaacactcttggggaggaacggcttacattcttgtgcaggctgagttcattgttagacgaatctaatgtgtatttagcagtaccgcatcccaggtaacggtgcttgaatgagatgcatgaacaaggcagttggagatagctgccttcatagagtttctgttctaggagaagccggctattgtcaaatacatagaaccagactctgataaccaggaaaacaggcctgcacctgcaggcccaataaggatcaattccttgattggtggttgctgggttttggaagctttcaggaagggctggcagatctgggtctgcagcagaacctttgggaaagccttagctttgcttaggatggcaattcaaataagacagtctagggggctgaggagtagctcaaagggtacgatactttacctagcatgccctagcactgaatagactaggtaaggtggagcaggcctataattccagcactccagaagtggaggtacgaagacagaagttcatggccatccttggatacatggtgagtttgaaacaagtctgagcaacataaattcttgtccttaaacaaatagatagacgtaaattgagcagaccgaatccaaaaattcaaaatctgaaatgttccaagatacaacatttgttttttggtttttttggttttttggttttttggttttttggttttttggtttttgttttttgtttttgtttttgtttttttttagacaaggtattactttgtagccctggctggcctgaagccctgtgattcttctgtttcggtttcctaagtgctgagcttgcagtgtgagccatggtgctcaggtctgcctaattctgagcataaccaaccccacttcccaagaggaacgtgccaaatttgacccattgtgagacagcattcaaaaacaggtactctcaaaatagcatataaaattaccttcacgcatatgtgtaaattatacatacagtgtaaataattatgcataaatttcatgtttagacttgaatcccatctacaaactgtctcattatgtttaggaaaaaaaaattcaaatataaaaacccctgaaatctgagcctttctggtcacaaaacttcatgcacaaggggtccagaaccctgtgatcacacttagcagtgctccagggatggctgattgccaggaatgatacttagcaagtgagttatgttaacccagtggctcctcctgccaactctgttatccaggaaattagggcacatggagagagacaactggccacagtcacacagttagcaagtggcagagtcaggattcagtggcgaggggttctatggccagaggcttagtcatgtgctctgctacctacaaaagccggaagcttgtgcagtgttctgcctgtggtgccttccagctgctgcaagaggctcaccccatcaggccattcacttgctgatggccagggtgggggtgggggtggggggcgatcccaccggagaccccctgactggtcttcaaagttagccggtcgctttagataaggaacagacttatggctgccccatttctctgtcactttctggtcgctcagcgtatttgcatttgtgtgacatgacaaagcaataatttttcattgtatccttcagtcacccatgagagattggatttaggtcacaatttattaccctgtggaatttaatccaatttttaacaccatgtcagccactccagtattagagcttttttaatggctgtgaaatttatacaatgataaagtaatttaaaacatatgtaggaagagcattgggacaaattgatgtgtatagaaccctacagtaaagattgaataggagataaacatggaaaatggtgattgattacaggacggtgggaactgtgtcccactgatcagctcttaatggcaaaattagtaaactaatttgttcttcacaattttgaggagagtttccgttgccctaaatcaagattgaggctgagtcacaaagcacaaattaatagctcacctctgagtgctatgtacctcaacttagaaacaggcctgagtgactggaaggttgccaaccgcctgtctcgggggacctttcccgccaccaaagtcggaagacaacgggcaggatggcagagtctccctttgtttatttagtgtatgggcatttgtgtatgcacgtgagtgggctgtgtaggtgtgagcgcacaggtgtatctgagtgtgtgcatgtgaacaagtctgagtgtgtgtgtgtgttatgtgtgtgcctgttgggggacaccggatgccctgctttctctgccttatgccttattttacagagtctttcactgagcctgggcttagacggccaagcgatctttctctctctgcccaaccctccaccctggggttgtacacaacggtgcttggctttttacgggagttctggagatctgaaatcagaccttcatgctcgctgcccttttccactgagccaattccctacctcgtactcggttttagaaagttgcctgctttctcctgtctcccgaagataaacacaattagtgccattctgaaggcacaaaggcaacacctctttgctgcctaccatgggtggctcaggcacaggtctcagtccccaagggtgctatgttagttacttttgtgttgatgtgacaagagcctgaaaacaacaactgaaagatttattctggctcctgtcctcaggggacacaggaagcacaacacacgctctgcccgggaggaggagtgttgtttgcttgttgttgtttgctgcttcgggttttgtttgtttcccctcaatgggtatggatttcaggtttgctagatgggtagttttaggaattgatggtacagtactgaatatacttgacactcccaaattatacgcctggaaacggcttgagtgtagcttttgcattgtacggattgtcagagggtgactttatagttaggtcttcttctgcacgcatgcattgtttcactgaggctcctggaccgccaacaccataggttgctccggtaagaactggtaactctttccagaggtaactttttctcaacttcattttggggtaatggtgggtcattgtttggtattgagcagaacaacagaataatcagatttatacttacaaagggggttgacagtttctagctagtaaatatttcagatgtaaccagacctgataactctaccttaactactcagctgtatatggaaaggactggatatggctgtgccctaatagataactgtttacaaaacagacaggcaggatttgacccaaggttgttctgtgtgcactcccattttaagacaaactgtgcctttgtgtccttaaggcagtggcagactaagaagagaatttgcaggagggaagatatttacctgccctactcccatcacacctccaaggtcaaacttgttctgacctaaaagttaggaggaacctctgcaggccacagacatcccctcaggtctgcagcatagatgttgcctccctggctccccatccattcctgggaaagctctcagggtagaacctctgcaaggtgacctgaaggctcaatggagccagagcagccagggccaggcttgaaagaacttggtccagctcctgaggctggctagactgcactgtttgtttctgaactttattagcattgcagcgggggaccaagagaatttagaggcaccgctgccagtgctttcaaagtctagccctcaaaggacaattaacctggttatccaggcccccctcccttccttgtttatggctgtgaacacaggaaatgcagtgttgggtacatggattgctatcaaggaatttaactgtaatttaaaaggctctatgggaaggaccccagtggctgattaagaatgcatttgtagagtaataaagactccagcagctcagtggagctcagcctccagacttatttatgaatctggaatcttgtcaggttcctcgggggacggggtctacacgggggttgtctggttccaaatgttttggattggcttcttgcagaatgtaagatggagaaaatggcccagcctttcttcgtctttgggattgtggagttaaatgtcagctccaccagggactaagagcagaagcaagggtatactagtttggccttattctgcctcattttttccatctgtgagatgggactaataatagcctcgcttgcacgttctgtgaagtagtaggtacagagcttgctgggataggtgacctgctcatttagtatgcccttcctgtcacagttttcatctttagggctgttatgctcttctggtaagcccaggtgactgctgatggcaggcccaaacttctgtctgagcaaactgaaagagtcagttctcagttctcatgccccattcagcagtctctgtagccaagacccagcatctcctgtggctgtcataatgctttctaacccatcccttcacatctggctgctgtatctacccattctctcccacaagtgacttcgttctactcttagagcggtctcctttgatctgccctgcaatattttactgtggtttcctgacagcccaccaaagggagctctcttctctgagactgcaccctggtggtgactgtggtcttgggttgaccaccctcacaccttctccagcctcctcactcccctcccctcccctcccctcccctccagggctcagtgagtcctgtccctcacctgcatcccctagagaaagctgacgttggctgaagccttcccttatgctgtacctcctaaccatactcctgtcattatgtctctcctgctgagctcatgagcttcctcggggacacttgtgtgtgcttgcacatgccaaggcatgcatgtggaggtcagagaacagcttacagttttctctttccaccatgtggacttggagaattgaacttgtgtcatcaggcctggaggcaggcatctttactcacatacttactcaccttgccatctactcttctttcatagcatttaccacagtttgaaatggatgcaggtttgagggatcactcagctggcatctctattccaaactagaccgtaatattcatgatactgttgttgttttcttcgtactctacctaatgcaaaatagatatccaaaatggatatatggatgaagggataggcgaatgggtagatggatgaatggatggatggatgagtggagaaatggatgggtgggtgtagagtgcatggagagatggataagtagatggatgggtagacgatgagtgcatgatggatgaatggatggatggatggtggataagtggatgagtgtgtatatggatgatggatgaataagttaatacatggaagaatccaggaatgtgaaaatggtatgagtcccttggctgttttgtagacactacaggagggagtctttgcaagagttctaaaagaactgagcactcatgtgatcaacgagaagagatgagcaagtgctagcaccttagtatacaaggagaaatatgtcagaaagaggcaaggacccaggggcctgcgtggtcgtacagagctcagaactcaggtatgatgggtgatctctatgacttgactggatttgagattgtcttggcaaacctttctcaatatgagaaatgtgagagtgtctggagaggatcaggggagaatggaagatccacctacaagatgggggtatcattggataaaataagtggggaacagttagatgaacacagtattctcacttctttctatttattggctgccatgatatgaactcttctgcctctccttacccaccagaggatggactgaaccctccagagccgtgagcaaatgagagccttctttttaaaagttgtttctgccatgtactttctgaggcaataaagaaagttactaatgttttgtagagagaatctggagtgcccccagcccccagtgcgatgaggtagataaccccctaaagcccacatctgagttctctagcacactctgcattctgatggctggcactctgctttgataaaactatagccaacctgcctgtttgttgctataatgtctgtctgtagttgcttcccaactctaagggaaaagttcaatagttaccatagtgctcatatggaacccaaagctctcttgatcaatctgtccctttacagagacaccaacctctgctcttagacaaaagctgagcctggctggccacatccagtatgtgtgtagacatgttacagatttgttatagtgggatgtgttaacattcatgagtgggaatacaggacagattcagcaaggagcaacaaaaactgaccttacagttttcagttgactttgagagatagtgtgagttgctcaaggtcgcaagggaaatgctttgtctaaactcactataagagagaagatctccagtccttgtctcccaagcacctacgatcactgaaaggatactgtgggaaggagtagtggcctgacacaaggtagatattccacaaatgtttgttgaacgataagtggatgaatgacgaccttgagagatgcagagtagtcctgccctggagggccttaaaagtgacttgatgagaagagagaatattttccagcctagccacccaggctgttgactgacatgttcagaatatgctgaacacatagcaccactcgagggactcccagagtcccttggtttggtcagtggtgggatgctgcctggcattcctggggtctctcgggggagaagagctgggttccggtaaatattggatcatctttccaaaactcctggtaagaagtgctgaggattgcagtctccagcttctaattacacccctcaggaaggaagagacctttgccaccggcacacttcatcgctgatctgaaacctgacacaggctcggtttaattccatatgcttttccctgggatcattaaaatggtctgaggaagtggttccctgtccgtcttcaaccctagactccatggtctcttcagtcaaggtccatgaccctgtgtgagagcaggcatggtgggcaggatctgcccaagtgaagaccatgagaaaaaccccactgggaagaaaggcgattaagtttcttagtatgggaggagaaaattttgaaaagtatgttggagctctcctcaggaacaagagtaacagggatcatttgtagggggtcccattgtttcacgctcagtttgggatactctagactttataccaagaagcccttctgcttgactttggatctctgaattctgtgtgctgttcagcctgaagttgttcttcgtgctgttttctgcattgaatactcaggtaaatggctattcaccatgacttcccatagccaacctctacccagagtgccagaatcttatactattgctcaatcaatttaggttgcattttgtcccccaaaagacactgaatggaccggggaggtggctcagtgagtaaagcacttactatgccatgtatagagaattgaacttggatcctcagaacccatggtgagggggatgccacacatggccatgcatgtctgtaatcacactgcttgtgggatgagatggcatttggagacaggagaagcttggggtctcacaggcctgctataggtgacgaaaacctgtctcaaacaaggtagaaggtaaggtccaacacccacagttaccttcctatctccccatgatgtaccatagcatgcgtgctaagtcatgcatgtatctgcatttatacacatgaacatacgtgtatatgtaagcaacacatagagtttgtttttattttttgtatttgttttgtttttgtttttttgtttgtttgttttctcaagacagggtttctctgtgtagccctggatgtcctagaactcactctgtagaccagattggccttgaactcagaaatctgcctgcctctgcctccaattgttgggattaaaggcatgcaacaccactgcctggccatcagagtttgtttttaatgttaatgtcctaagaacccaacttgtggatgtggtgatctgctcttcataatatttacctatggtcataggatatttgacctatgatgatcaggttcaaatgaaggcattaaaatgagccttcgtgtaacatgactgtcctcatgaaaaggagacatttgtacccagaggccaggaacacagcaggaagcttgaggaaagagtcagaggtgagcctctaggtaccaagggatataacagttgtccgcagtcatcatcaactagaagacgtgccctcagcaaatgcacattcacaggatccctgatctcagatagccagcctccaaaactgagagagagccagtgggttctgccattgcaggcagcctgtattctgttggaggagctcccaatgttaataaagtggacatcacaactccatcatccaatggcacctcaaactcataccagctcttcagacattccccatctaccaagtccagctttcttattataacctccaccatattttatgatacaaacacccacaggtatctctaacagtggcctcagccaagcccaggtgcttcgattccagacaatgtgtgctcgtcaacctcagggaggtagacagaccccacacatctttaagcttcacccttagcctggaggctaaagccagcccctcacagacccaggccagatgctcactcttcttttgttttgttttttaatcagcaataataaaacatagagctcttcattgaagcattcagagttttaccttgtgttgaagttaacagaaagatttggcagcattgtccgtagtgccacaatggcaaaagtcacctccgtatgatgggacatgatgtttatgctatgcctgtgagggtattttaaaagagggttagctaaggaggaggatgcgccttgaaggagcttggatgcaatacacaagggggaagaagaagccactggctgtcagtggtcccttttcgccatgctctggtcagccatgaagagaacaatctcctctgacttaggctacagataccatgcatgatgctcagccagagtatatgaggcccagtgactgtagactgattacactgaaactatgagccagaataaattcttcctccattgcctatttctgtcacgtgcttagtcagtgacaaaaggctaatagcatataaagccttcctcataggtgagctaggaccttccactttcaatatagaataccattgatggggtgttaaggaactcatttttacactttgggtaagtggaaatgagattccaaaattcacagagggagaaaaaaatgaaaccatcccgtcagccagagtaccccaacatcctgcgatatctcaacccttcattcatagctttgatccttactctgtctataatcctatttatgttaaaaatggcaatgacatgtggtggtgagaaactgggctggggccaagctgttatgtagagggtgctcaaggcacaaatgtaccagcgttttgtgctttccatgaacagttacaggcacgaggcaaatctcttgtaagcctggaaatgacgatcaagaaggatacggtcctgaaaggaactgtgaagaaagcatttgtcatggttttccatacagcatctctaatgaggaatctctaccatgactcggcacatctgtgcggctgaaaagcaagtagctgtcagatgtattaagggctgttgaggggcactgggatgaagcccctctctctctctctctctctctctctctctctctctgtgtgtgtgtgggggggggtgcattgtaagtgtgactccctgtgcatgaacacgaatgtggaagccagagaacaacctcactgtcattcctcagacaatgtccagtttgttcttttgaggcagtgtctctcatttgacctagaacttgccaagtcaggtaggctagctggccagcaacccctaggatctgtctgtcacctcctggaagccacccaccccccacccaccctcaggactgggttttccaggccacactgtgtctcaagtcgtgtttgtttgcttgtttttaacatgggttctgaagatcaaattcaggtcctcatgcttgccagtgagctggcatgagccctctgactatagctgtgaatggtgagagagatgccgaggggaaagccctactgcgtgccctccttaacacatagtcagtcagaaaagaagccagtgatcaggtggtccatcagctcctcccactgcttcatcttgaactttgcttggatgactctccaaggtaaaggggctttcttcgccaaaaccctgaactacactgcatttcaaaactctaccctcagagtggattggaatgggctacatttttttcctgcaataaaataaagcaacgaatataatggagtaaaatgactccactttttttttcctttcaggaagttcccccattttctcataatgagagatcattaaaataaccagaagacaaatggcatcaaattaataaaaatgtagatcaaatgatcctctgttacctatttttgctcaattgcagttgagaagtacattgattaaactgccagcacaccattatggtcgtattcattactacagtgtaatccatttgattatgatagggtaataactaacacagccgcatagacagatgctcctctgcggctaagccatcatctaaggtggatctgcactgacaaacactgggtccctgtcacctagggtgcattgcactgtagagttggaaagaaaagatattccatttccctcacctttgtcatgtgactcacctcaccaggttcccacatggagcgtgcttgagttccactgtacagtgcataacgagcggggtgaggtgtaagagaagtcaggatttttttttaattagtttgtttattgactctagagccaatagtggatttgattgattcctcatctgtttatttatccattgggcttattaattcattaggtagttattattattcataggcagacagaagggtgtcatgcagaagttactgtgaaactggatagagcttccggatagatggctgggttgttaaagtgtttgctgtgtaagaatgaagacctgcgttcagatgccagtacccacctgtaaagcttggtgctgctacctgttcctgtaacccctggggaaaacgctggaggatccctgaaatccagtgagcagctgccctagcaaaatcaaggagagaacctgtggatggatggatagatagatagatagatagatagatagatagatagatagatagatagatagatagatgatagcaattgagaaagattcataaactgaaccccatatatgtgctccccctaataaacacaatgaatttactacttggatactttgggttgctcacagactcatgggagagtcaagtacattgaatggactgtcatagttagtagggagagaagtgtgcatggagattcatgtctggtaacatagagggatgattctgctgcagggaaggcacagctagctctgggagcgaaacatctggagctaacactggcaagctctctgcattagcagagagactctcgctggtgagcaaggctttccagctcaggtcagctccttcccccaatacctagtctcaccagtgacaacaaatgcctgtggatactgtcatactgccaccagggagcagtagtcctgtacaatggaggcttcatgtagaaaacactcagtagagggtagggagaaggccctatgggtaaaacagcttgcaactcaagtgttgagggcctgagtttgggttttgagtactcatgtaaaaataattggtgtggtcacacatgtgtctataagctcagtgctggctgtggggtacagagacagggcattaccgaggatggccagcagccagcctcaccaggacactgccaagctccaagttcagtgagagagcctgtctcaaggagaaaaggtaacgagtgatagaggtagatgcccagtgttctcctttagcctccttaagagcaccagtatataccactgcacacactcctgtatacacaagcctgcacagcacacatacagatacacacatgtatacatacacacacaagcaacgaaggtcagtgagcattttctgttcttcttatttactattttctgttagcattcattgctggtgggaatgtatattgtaaaatatgaaaataaatacagaagttcagagggagagagagagagaaagatagagagagagaaaataaaataaagacagacctgccatatgtttctgctctaataggcttggcaatacacccaaaggaatccaagtgagcatgccatagagacacctgtacgttcctgtttattgcaacactattcccagcagctaagttataacatcagccagatgcttatcaatggaggatgggtaaggacaatgtggcatgtatacacaatgtttcattcagccataaaggagaattaagccacatcatgtgctggaacttggatgaaatagagaccatcatgttaagggaaataagccagactcagaaagatgaatactggaataatgtgtgtgtgtgtgtgtgtggggggggggtgtcagtagcattttctatgtgaattttctttgtatcctccagtctagaggaataaccatcacccgcaaatcagccttgcccttgaggacagcagaacacaggcagagcaaacaccttgcctgaggcctcccagccagccaaaggcaaagtcaggctctgaagcccgtgttattacacctcgtgagggcaggcctttcacctgcatgaagctgacagtttcatatgctagaggtgttcataactagggtcacaagacaatcttaggggtcaaggttgcaaggcacatgcctgagttaggcaaatgagagtcagtctggctgaatggctcccttcaaaaccgccaagctgacttgctgtaaacgtagtggggaggtttgcacatgtttccaggaaggttgttggggttttgtttgtttgtttgtttgtttgtttttgttttttccagtaataaatctgaatttttaactgcaatttcttgattgacctgacaaccatattaattgaaaacaagtaaggcaggcagtatgaagtctgaacgcctgtctgtaagcaaggctgcctgagcggccagctgagagctctggtttagatcagggtgtgtctagaggccactgtctgtgctgggtgccccacattcttcctacctcatcatctgcagagacggctcactctctctgctacagtgggtgtccctgccagtttcctaacttcagttaacagattcctcaccgtctccccgtaggggagttggctttagttttccagtggaaccttccaccccattcctgagcctttggatctgggcgtgtgttactttgagggccagccgtgggcagccaggcaggagcccagctgagttgtctctgttctcatttccccttgcagctggggagaagcaagttggaaagtccccgtttccattctgtatcaacgtgcctttattaaattgctactctttgtatgtgccaggtgagggaggattgatcctgtaaagcagaagaggtaatgtggcagatggtgttacgggagaggcgttacctgaatctgtatgctgcaaatgttgaaaagaggaagtctatcccaaggaggcagtcagggaaagtccatgagcttaactctagctgtggctctaatttcaccaagtcaagagagaagacgtgggacagtcaccgacaccatcatcaatcactaccatggttatcattgcacaacgaccatcattaccactcaacacagctagtgcattgttcccagctccaggaccatcaccacccaacagccccactcccagcaataccatcattaacactacagccatcaccagacaacctccagcaccacttctgttcctctcacaattaccacatcactctcacaccagtgtgaccacttccaccttaacaaacaccatcacccacatcaccatgagacattcattaccttcattgctaccaccaattccatgctaaccctacaccaccgcctccactgctaacaactccataggcatcactatcccccccccccatatccgcactatgccatttctttaaccacctcccatcaccacctctatcattagcagcatttcaccattgtcgctcaatagtgagcataatctcgatagcccacactcttggcccctgcaaggaccctgcagcaaacaagtctaaggtgcttagggaacagccaacatgagctggctttctctaagtcatggtgtcctcaatcttccattgaatatataatatatttataccagtgatttgtgggagtgaaatgtagccatatatggagtccttgcagctgagccaggtgagaggcagccactcaataacttgccaccatttaaaacctatgggnnnnnnnnnnnnnnnnnnnnatttaaaacctatgggcctttctatgaacagatacattcagtcagcaggaagacagggcatacagcattcacaagctacgaggagattggatggggagaagggggagatgaagtttcctcctatcagaagcctcagttatgaggacattagggttctaagtcacctattggctattaaagataggaagtctttctcgtgacagcaagcacctccccctcccttacccacagcctccaggagttcctgagcttatttggtatgcaccatccagtgttggaggtgacatcttattaaacaaggtctgcctgcaaccaggcaagtcacaatgaagtcaagaattaagataccgcttcccatattgcctaattggattacagggatcataggaatgctgtgttgactataaagaagttcaggggattattgagtgatgacagtcctctgctgtccttcactaatcctgtcagtcagaaatagctcaagatgaagggagactcctctgcaaggagctgcctttctcgtttccaggtaggctcttggagggttgtggtgagcagaaatgtggtagagcatgtcagactatggtgacagccaccacaaccatgtctactcacacccccatctctggtccccttcacagtctagggtccttatccaaatgttaaacaattaacagatgtttctcccttgaggtcccacaaaaacctaccatgtaggctggagagatggctcagtggttaagagcccgctgaatgtctcacacccaactgtaacttcaggaaataaatgcccttgccctccatgagcactagtctgtaacttcaggaaataaatgcccttgccctccatgagcactagttttcacatgtacacacacacacacacacacacacacacaagaaaatagaaataaaacattaacattatttttacattatcttgaacttttctccttggtgaatagcatacccatcctccaagttacccaaatcagacgataaacggcttttgtctaattccttctgcctcagatccacaaggtcactctcaagcccagctcggaaatgtcttttctccccatctcttctgctccatatgttctgtagaacgctcccgtctcttgttcacaatgctgtggtcactctcaaactactcctgtctccatctccaattttttcggaatgaaagcactggatccagagcgagctctttaaatgcttctgctcacgttacttccctgctgacaattcttcggctataaacccagctagtacaatgttacgtgggcctcatagcccttcccaggcccaggaagacattgcgaatcaatccctgcactctttccagctgagcaggatctggacagagcttttctgagttagtagggttggcaggaaagatgagagctattcggcatttcagcatcctgtgccacctgcctttgtctacctcttttgtcttgcatctccccacctctgccagagaactctatccaaacatccctgaaccctggataggcctgactgacacccacaacccttctagaatgtggttctctctacctggattgtttcttctcacatggtcatgcctggtaagcccctacttcatttaagtgtcatcactgtgtacagttataagaaagtcttttccctctaagcccctattttccttcatctaggcccatctagggtgcagtgtcatgacgtacagaggcttttggtcctgttacctgcctcctgattagtttttcaagctaccgttgcaggaacggggacaggattatctatctttgcctgcctggtgcctgtcacagctccactctgagctactgcttgtattcagtaagggataaatggcactgaagtcatgcagaatgcttggcttctgccagacgtcagagttcacctctccaaaggcaccattcaacttcttcccagagatctacatggtaggcatggcttctttccattctaaaggctaaaatactaaggctttaagaaggaagtcttctgcttcaggctatatggaaatagaaccagacatatctaaactgttgtccctgaaaagagacctgcatctggaggcctttttcagattgtcacaactgaggggagggtactgccggcttctagtgggcagattccagaagtactggcagacatcacacaggcactgaccagttcatcaccagtggagaaacatctaccctttcgtgccatgggaccaaggaaaggaaacttggccccagcctctgcaagtaaccatgacctagaactttcccttgtggtgtgagtcactcagacctgttgctggggttttctttggttccaattactaagcatcagacactactcatatacaaccaggagtttgcatccctgtgtttatgcaagaccaggcaagccactaccagcactcaatttaccatacaggattctaagtcttggatcacatcattaaaacatcccatcctaacctaagattggtctctgtgcaagccgcgttcccaatctgcctgtctccaagagcttgccgctgaacccaaggcctcatgtagatctccaacagctgaaatgaatgcatgcagaaagctttgttttcttttgcagctattcctaggagcaaagtaaataagtaatttagataaaccccccaagaactcatactctaaatcagcctaagctaggtgaagtcagcagagggttaagagcgcctaatccattttcatcaggagagtttgaactttggtcatagtgagcaacttagccaagatatcacattgttcattattcacagggcactgtaacttagcgcagtctctgagtaatctttttaagcctgccaaaagaaccggtgttaattgcttacactggaacatatttgctgctggaaatgtcacaccgtaattatatcccatttcgctgtctgacaagtaatatactaaaagaaaattggctttcttattttctcctgcctcttcttgtgatgtgtaaaaaaaaaaaaaccattcctggaagccttcaggcagcacacaggttgcaagtttctggacttgtcacaaagtttgtcagcaaactttctggattggctgactcgttcttgcagacaaacagcccagctttgcatactttgtgccccaggcagcaacaggacaccctcaaggagggacctgtgccgagtctagggctccacttctgcatgcttgcaactcccaatacaattttagcaagaccctcacatttttatgtgttggaccctgcaattgatggaactggtcctgcaaaagaggaacaagcggggggggggggggcgggaattactgacgtatgatggataaaaggcaagaagtcattggcacttaacaagatagtgagaatttcagagacatagacatgtgtgtatacatgtatgtaagtatatatgtcctcattcaagctaatattaatatgacatatatgcacatatgtatgtgtgttcatgaacatttgtatgcacagttatcctcgagggatttgtgccaacgcctctgtggataccaaagatgcttaagatctttatataaaatgatgtcacatctgcattatacctatgcatagcctcctgtatacttagaaacatctctcgattgtttttgatacctagtataatgttaatgctatgtaagtaatcattaggctgtattgcttagggaaggataacaagaaaaacctaatattcagtgtggacactgtatttccatggctggctggttggctatggagagggctagttgtatgtgctatgtatatgtttgtacatgcatatttgttctctctctctctctctctctctctctctgtatgtgtgtgtgtgtgtgtgtgtgtgtgtgtgtgtgtgtgtgtgtgtgttttatcagaatcgctggccatgacatgagaccatgcagggcagacagtatgtctaatccagggctccttctggaaatttggcactctacttgtaagactaagcttctcttaatccaagggttcctaaggaaagggagccatacccagcccaccagctgtcctgaaagtcctatgaagcagagcacatctgcacccctcatttttgaggcacctgtttctgtgttctctctatatcctgccggggaggaaacaccatgacatgtgcacaggaggtgtctgcattcaagtctagaagatatgccagctccggcacttctgttttattggcaaaagcacagtctcttggccagacacaactgcaaggcatgctgggaagtaggttataaaatgtgccaaggaaaaggcaggagcagaatcggcaggaaccccaacaactctgcttggctgctctggtcagatggtgttccttcccagcatgcacatttgcaactgagcccaaggttttgggtcttcacgaagcacgtgtgatcatgtggtttattctggcagaaaggtcaccttcccggggctgagaacacttctccaggaagcttttctctgagaacgtggctgcgtacctgacagggatatggggcagagggggaggcaaggttagtaatttagttgtcactggctgacaggttagtcttagaatatgttccctgcaattcaaggcttgctagagagagacagagagaggcacttaacaaatgtcagcccttttttgtaaactgccacagctgcctcatgctgaccctgaagcagttgaagagttgtctgcagacttccatcacctcctcattccactcgcactggtgttctcttttccttaatgtattctttttttttcagttttcatacaaatacatattgtatgttgagcatagtccccctaatgccctcctccagtcctctctgtctctctttccctcccactattcccctttgtacctaggcaggtacgggactaggatagtgttatacagacagacacacatttggacagaacacatgaggtacctgctatcctaagaatgacttaatttgcttggctggcttctctccagttgcatccacttttctgcagacaccaccctcactgtgtgtcctgatccactactctgttttgggtgctccaggttggctctagaactttacaatagcaaatggggtggtcacaaacactaatgtatgagtatctcttcaatatgttgagttgcaggtcctgccaataaacacacaggagaggcacagcagaatcatctagtaggtctattcataggggttttgatgaggttctattctgacttccaccaacagtgtagaagagcttctctcatccacatcctaaccatcatttgctgttggctttcctaatgcctgccattcctgcccaccccctggtattcctgatactcaccaacaggaagagcagccatcttggtcactagagagggctctgaaaacagtcaggactggaacacgggaacctgtagttttgctcgtttcccaccatgacttattaagagatgcacggttctgcgatgggatctcagcctcagcacctgacttgctgaccagctgagcccttgctgttgcagccatgacgcctcggcagtcaacagtccgacagttcctctaggtctgtgtgcaagtctgactccctcagttctcatacctacaagtttctccagacttcataaatgtccgtgggatgggaaggactcaactgcccctatgtaagacatgctggtttagagcatccacgctatggtagcttcgagaaactctgttctctccttatggaatctagcatctggatgcagtcctgtgactcaatctctcaaacatgtgtagaaatgataactaccttttatcctgccagttgactggatctgtgttcatcaaagtcatctgatgtcctctgtcacctctgtcaccatcagagagacccaagagcataagatggaatagccatagaagcaacctggatatagtgatggcacctgtgtcttgtgtttgaattgggactaaataaaggagaatgcagctaaccagctaaccaaaaccacagttgacaactcgtatgaccataacacacatgtaacaacaggttatcaaaaatgtccaggagtgtggggagatggcttagctcttgccactcaagtatgagaacctgagtttggctcctcagcatccaaacaaaaagtcctgacatagtagcacacactgcaacactaggaaggaggacagaagaggattcctgaagctcattggccagccttgctgaatgaatctgtgatctccatgttcagtgagagcccttgagtttaaaattaaggcagagagtggtcgtgaaagacactcaatatgggtccttgcacatatgtgcacacccctacacacacacaaatacccaaacatatatatatacacaatgcacaaataacaaatacacagaacacacatactgacaaagacaaacagatacacacaccacacctaggtggctggccctggtgacagcttgcccaattttcactcctgttcctattttttgtaaatggcagtttcaacaaatcctgcccactgatgcattgtttaaccaaatgtcatctctctgccttcctcatttaagcatcatctgttaggtttacacattgatacacccatgaaattagcattacacttgtttcctcgtggagctgactaggtttaatttaattgaagctgttgtcactgctgatagcctttggaagctgcaggggcgctggttgtcttagcttaaccccgtcctgtctgaagatcaaggcttccttctctccgggtgatctgtgacctgtctcctctctagctccttagtaggtctttccttctttagaaaagggtcccaagccataggtggaaagtcattcttccctgtgctgggaaggctagtatgatgggacaggaactctcaaaccagtgactgcaaacaccgcaggcaagtgctggctgccagaagtggctctgaatgtgcaaagtgaggcacagcttcactgagcctttcctcattcagtaagagcctctctgggagaggctgtgcagaggctggtccactgcctgactttccagtctgttacctggtaatggttcttgataattgtcccttaaatgaatggcactgtccctccacctgaccctaccacacacccacatttgtattattgcttttcttgttgctggtaccaaataatgacagaagtaatttaaggtagaaagggttggcgttggttcacagttacaggatgccattcattatggtggcaaggcacaacatctagggcagctccatacatagcaatgggaccttgaggtagtggtcatacatatctctatggaccagcaagcagaagccttgggcagaaaacagaagtggacataatctttaagctctgcccctgaccaatgactccagctgaataatacaaaggacccatcctttgtattattctcaaattgtgtcatcagcttaagagcaagtgttgaaacacgtgagcctacgggggacctgccatagtcaaaccagagcaaggcctagctaacttacggcatatgtggctattttccaaacaaatgaatgaatttctgctgctttgttcttgaagcttcctaagatgacctttgcagtaaccttcgcctgctttcacccctcgggatacccaaggtggtgcactctagtcagtcccaggaaggagtgtgaccttcacagacagaggacataggatgagctgaggggacagatgtgacctggactgggagcaagatgagcacagtgtgattgaataatccggcccacatctctgagaggcgtgcgcccagcagaagcttgggtgtgacctcagaaggcaaatggggatctttcggcaggtgagacctgcagatagatgaatgtgtctgagagccatagcttgcaattcacactctttcctagtacagcccaggcacagaggctcctggctttgaagccaatcaaggaagaaccaagaagccattaactatatgctcgggatgttttgattattatactacaaaattttctacagtataggaaattgccaaattacaggaaattgccaaaatctaagcagaagtatcatgtgtgcatctaagcagaagtatcgtgtgtgcatgcacacacacacacacacacacacacacacaccatgaacctctcctctcgctcactttctttaaactaaaaccatcttccctttcttcagtgatgtcttcatcactgttgtgcaatggcggcttctgtgtgtttgtgcgtgatcatgagggtgtgtgtgcacctgtatgtacatgtgtatgtgcacataaacatgcatgtggaggtcagaggacagctttgggtgtcgtagcatttttcaggtaccctttatttgagatctttgacgctcactggcctagaattttaccaactaggctagactaactgaccctctagcttccaggattctaccttgccctgcttcgcatcacgcaggttcatcaccatgatcaacaggtaacatttcatccaacttcttccttgggttcaggaaatctgaacccaggtcttcacgcttgcaaggcaagtgctccacccactgacacatccccctcccaacctcaccctgtgataccttctttacctcactcccacttcctcctgcctcagctcttagcttcactctggcttcctcagaaagttctggaaacttccctagaagcattgccttctccctatccttcttctttgcagctggcacctgccctccacactccagcctcaccagactctaggcttcctggagacaaaatcagatcattcatttgtgtgtcctagcacctgacagggcagctgctcacagtacctgctctgtgaatattgaaaaagtgggcaaagagagggggttgtattcatctatgtggaaaagacatagagcatattgctgcgggctggaggcatgctgcaagttgaaatgtatacagatatattacatatattcatacatgtataatctgtatgtagaactgtttctaatatgttcaacagctagataaaccaggatattgatttctttctctttcttcttataatttttttttcatttatgtgtacatacattagctagtgccatagtgcatgtgtgcacttgcatggttcatgtgtgcatttgcatggtgcatgtgtgcatttgcatgctatatgcaccggcttgagttacttctctccttcctcctcattgtagattccaggaattaaaatcggatcgtcaaacttgacagcacttgctgagccatctcaccagaccctctttcttatttttttaatattgtcttatgtgcttgaattttctgcagtctatatttccatattccacagtcagtcccaggaaggcgtgcgatcttcacagacacagaaggagtgtgacaatatagacagagaaatcaaagaaaccagtaaaagcactcatagaaggagctgaagctctcgtggttaaataataataattcccccttgtctttagcccaggacctcagctcccctcatgcagtctttggtctgtgcattccagccccacccaggatagccatgacagaagtggatcctgggatgtcctgctaccacaaactttctcaagtgtacacttcaatatccatttctttctgcaccattaactcacccagtatgtcctgggtgtccccaacattatcaatctgacatcctggaagtccactgatgggaaaaacaaacacaagggggcacatagccagtgtattgggttggcctctgtggataatcactgttgaaataaacctagctcataagtcaggtgccacatggtggggccctcgcagaggaccctgatgctgagattcacttggcactctggtttcatgggggccatgggtagaggtagttctagaacaaggctgcctggactgaagctccatactcactccctgtgtgtctcagtttccccctttatacagcagacatgctgagttcacttgcaagtgtttgcaagggtccaatgagatgggaagagactggcttaaggaccagcccaaagtgaacagagcttgaagactccagtctgagttgggcaccgtgacagctttaacatgacaaatggttgccagtgtggggaaatgtcccttcttaaaaagctaaaaagcaagcacctgcagcgcatattcatagtttatgatcaggaggcagcgttaatggcccataatgtgattactataaggatttttattaggaaaattccaaccaatttggcattaattaatgtactgttaactttcgagtgttactcctttagtccttggagagttggagaaaataaacctgttgtcaaaacccttaccctgagaagtaaataagagttgtttgctcctcgagaggcccggagtaataaaaacagatgagtcactgctgagttcagtcggtatttattgagtctgtgagtcccttcaagagaggaaagaggggacagagatgaaaatgtcaagctgcgaacaattccagaaagaacctggaagcttccatctctgggtcaaaaggcaagaagagcatcttggagctgtagccacattagcaagaccttgagccacaggatgcaaaaggctgcacagaacccctgcctcgtgcctgctccccactttttgctgcaaagctgtgcactgtgtgatggcaattgggaatggcaaaacgggtcctgcccatattccatttcaccactgtggaaaatgagtctgtggaggagctctcaatgcagtccttagaatgattcccaagtccccaaataactttgctcctgtatggccattcttgtccaatgcgatgcttctacttggtctctgtgtaccaaccacatgagccttcctctcatctaccatgctggtgtgcactacaggatgtttgcctatgctgttccctctggatggagattcttttccttcactcttgtccagtgacctcatcaatcattctgtagtcggcagcccataggccgtgtctatacccgactgaatagtaattagattggtagggctgccataacaagagaacatgagatgatgggcgccttcaaggagagagatgcattatcccaatatttggaaactatagttcaaggtcaatggtgccagcatggtctgagttgtgacaagaactctcttcttgaattgcagatagctgccttccttgtcttagagatagtaagcgtctggtatgccctcttaataagggcaccaatcccatcaacccaggactccacccttttgacttcctttaacccatttgtcccccttaactgagtgtacatctccagcaccatgacatggtaggctttatgacatgggtttcagcatcagaaacgccccaataattcctgttgatggtgtctttgataacgatcctatttccttggcactggggaacagaagaagggtttcataatgctaaattctttggtagcttcatggaaagaaggactgaaatagtgtgatggaggcaaggttggagcagaacatagaggagatgccctcccttggaaggcatagtaagagtcgcaatgaccaccactgcatagtctaccatgacaaatctctcctttctgggagcaaaagcttttgcaatgaacattattccccgatagcccagggcagcatctacctggcccattctagtcactctttgtcccctgggcagacttggaagctgtttgggagcctagtgatactaaatgccctgtgatgtgtgggccagccctgtctactcagccatggtgatctctaaactccagtggccccgccagacaagcagtgcttgagcggagggaagccagaatatgtactgaaccaccaagttctttctcttcttccccggtgtgtatgtgtatgatctgtaacatgcatagttatttctgtgaatgcatgcacttgaccatgtgggaatgtgtgtctgtctgtctgtctgtctctgtctgcatgcgtctgtatctatgtatggactggtagtctacttcagatttttttttcagtcactttccacctttaccttttgagaaaaggtctctcactgatttgactatgctggccagtgaccttctggaccttactttctccacccttcaagcacaaggtgtcacaccctatgtttgtttttttgtgggtgttgttgttgtttttgttgttgttttatatgggtgctggagatctgaactcagattctcagatttttattatgggtagtttaccaattgccccatttttccaacctcaaatttgttattgttgttgttgttgttgtttgagaagatgtctcacatagcttcaaattgactaggtagccaaatctggctgttttcttacatggttgaacatggatgtttaggcctaataatgagatttgtatcccagttctgcaggccagacgagctacttgctctgagtctctgtttccttatctaggaaatggaggtaatcagttctatccaccattgcagtgtggggagcagatgtaaaatcacacacccagcagggcacagagtatcacatgatttttattataatggccctttcatccctggtgcctggaaaaggccacaccagcaaggtagaccagatctcatgggctgcaacgaagcattttcacagatgatgtgtagctggccaagtgactgggacctggtgaattgcggggaaatgtaccatacgccatcaatatccatcccaccagtttccatttattgagccgtacatcattagaatatccctgggctctccacaataaaatcaataagacggcgcagccacgggctgtggtttaataactccaaacttgaatagggggaaagaaaatcagtgagcaggaaaatgtcctgagtgcttggtcagagagtagagggagactctttttggtagtgtgtgggggggggggggagattaagggtgaaccagacatagactctaggtagaggaggggtctggagagaagagatgtgactgtttaaatatagggcatcaaaggtaggtgccaggaagtctgagcacattattgccacctgagaacttccaaggaaggctcaatccaagcacccaacgtcatctcaggcttcacaaagggccccttgcatgaccactagatgccttcattgctctacaaccaccaccaagtgtgtttacacaaactggaatgttaaagcctccccagagagtgtcatcttaccagactacagacttgtgtgtgaatggcccatcctacacctaagtatcatcactcaacataggactgtacttaattcaatatttgtcagggtgagaccaaggaaagatttttttttatttatttttgcttttatttgtttttctgtggtaccgagaaatgagcccagagccttgcacatgctggaaaaggcttgcccacctcatagctagattcaaggccagcattgttttctagatcttatttgcttgtgctttgattaggatgtccatatggttctggtatgctggttggggctgagaatcctggacctacaccagtggttttctattacccttgtcataactaccctgggagagggcttatcacagctcagattttgttccacacactggagagtttctgacttgggagacctgggcgagggctgacatttgcattttgcacaaatcccttcactttggtattgctgctatccgaagaccaccttttagaaatagctgtgggtcattacttctcaactagggaagattttgcctctgcaactccatcaggcattggataatgagctgagactttttggtttgctcatactgggcaggtactcatggcatctagttggtaaggcgggaactgcctaggacagttcccacactaaagagccatctgtaacacacacagcaacacagccaagctggagaacttcatccagaggaggtagtggttagaagtactggagaatggacatctgggcttcaggtgtgcttaacacagagctgtagtgagagctgagctgcctggactcctgttcatcaaagcctggctgtgatgcatatttagatttaaggcagaccctagcctgacctcttgtctgtctgttggctctgtgatcatgagcaagagcctcaccctctctgagcctgagtcagtgatctagaaacagatcatttctatgtgcatcactgtgacggaatgctggaaaaacagcctggtagatgcttactgtgctaaagtcaaaataaaactcaagaggtggtttccacacagatgtctccctctaacagagagatgactcctccaaaatcccacctcaaatgattcccaacaagctcttccagaaaacctggagtgagcaagggccctgcgccaggaaaagtgaatattgcctgaacctcttgagttcctctggggtatcaaggactgcctggcatcacccggctacgaccttgtctcacacacaacacatcctggcggggaaggaagctggtagacttaagtttgcatcatccatgtgccttcttcaccacatgccttcaccacctgctctgctgtatttactacaatagttcacctttgttttttacttcagtgggagcagggcaaacaaatggaagcttctgttctcctggagctgaagttataggcagtgtaagccacccagtgtgggtgctgggaactgaactcaggtcatctgcaaaacagtacatactcttaacctcagagccatttctccaacccaacagaatgctcatttttatatgtcctttaacataatttaaatgcaagatagataggtgggtggatggatagggatagatagatagatagatagatagatagatagatagatagatagatacgtacgtatgtacatacatacatacatatatagatacatagatacatagatagatacatagatagatacatagatagatacatagatagatagggtatgctcattgggactgtgacaagaaaagaaagagtaaaaagaaaggctgagatggttttcccagaatggaactatttctctggagacttaaagatgtcttcctgactctcattgacctggaggagacccagttgcagctgccatgttgggaactccttgggcacttagctggttcctcccagaggctttgctctagagcaaagaaaggtctttggcctaatccaaaacctctaggaaagaagagtccagcctccagccagtttgctgggtgagcaaacccagccacgtgcaggagttcaggctgagtcttgcacgtgtgcctctagggatatgtgcatggctgaagctgtctgccttcatccgtcagtcacaaactattcactgagcattcaccaccaagcttagctgtgtaccaggcccagaggccaggacgtcctacagacaatgaagcacagggacagacaactctcaggaatggcaaccttagatccaaagagtaccattcagacagggtcagttccgtgatcgccttagaattccaaggtatccagttttttccacaaaatttcagaacttttatttctctcactggtaaaataaagcatgggtcctgagcctggcagacccaagtgtttctctccagcatcatatacactagagagggtaatttctcattcagcagtagggggctatcatggtacttacctccatggatctggagataattaaataataaactgcaagagggtgaggggagttggctcagtcaatgaggtaagtgtttgtagctcaagcatgaggtttgaccctcggaacccataatcctgggaaagtagagacctggtgcttcccagctgatcacctcagctaagacaatgagcctcaggttaaggcagagattctgtctcaagaaataaagtttagagcagtcaaagaacatacctgacattgattttgagtctccatatgtgtgagcccagacatgcatgcaacacatacacacacacacacacacacacacacacacacacacagaggtgcacaacccacagcccccaccaggcacacaattgcacaaaagccaacgatgtagttcaaaggtacatcacttgcatactatgtacaataccctgggtttttatccccagcactgaaaaaaaaaaatttcctagtaggaaaaatcctcccttcttctgatcctgacgatgagcctacgagctcagggcttctgccacacccatccttcctacatggtgctgttgctgacgtgtgactgcctctcatctttgaagggttggagacagcctgcacaccacacattatcaatgaagcattagtgagcagagaagttggctatcttccagaagctctgctgtgaaaagctgaaccctaaaccccgttccatgagcctcccacgctatgttaagctagctgtgccccagctcacagcttctgacccaagcccatctgcatgcaaccccatttccacttctctgcagtccaaagaactaagtaagccagaaaatgacactctcccatgccaggaggcactttgagaatataaacagaatcaacagagagccttgttggtagagtctattccaggccagttgcttcttccagttgcttgtgatcagaggcagatactgggaagaaacattctagatgtgggtgttcacttgtgagcaggggagtcagggtgaggtctgctctaacctgagcagattgttaggaaccaggccagccttggactctagaacccctcagggctgagctaactattgtttgattctaacaattgtgggccagtggctaaatagaaatggtccaattacactttcatttgctgagcatttgctacaggcttggtcctgtgctcagcactgaacataaacaaaagggagggaggtgagacatctatgcctacatccacatctatgtgtctatctgtatgtgtctgtatagatagctatatccattcagagtggagaacacaaaggcttgcagagatcacataacaccacctaaaatctcaaatttatcctgaccacaggccaaatctaaaatccttacgtgggagttaatagaactctagttaaaagcacatcctattctttcaggggacctgagtttggttcccagcatccatgttggtaactcacaaccttataacttcaacaccaaggaatccaataccttcttctggttttcataggcactacatttatatttgcaaacccatacacagataaataattgaattttaaatctctttataaccccagtgtctttctttcatctccagattaaaattctacaaggcactccaaggcactccaatcacaaacacacccagcacatatatagaacatatatgcagtaccaacccctgtccttcaggaacccattccaatatagaagttgcctgaggccagatagcactacacacctcaacatactccctcctccctgcccatcccctcactgagtgtccatgattctgatataagattgcatagaatttgcttgtagtcctcaaccttctcttgtagaccattgctagattattcaaaacacccaaatgcagtataactaattgtgtttagagtagaacagtaagaaatgtctgtatatgttcaagagtggcatattatgtgtacatgcatgcacatgtctctgtgtgtgcagatgcatgtgtcagatacttacaagcaaggggaccttctcaagtgtcattccccagacattgtcttgagatttttgttctttacttgttggttggttgttatttctttttttatttttgagacaccatctctcattatcctggagcttgccaagtagactagactggctttcaggcattcttctttttccacctccctagcactaggattacaagtgtgcacttcctggggaattgaactcaggaccttatgtgcacaaggcaagcactataccatctgagctatctccctagcctgctcatttgtgtttaaaataaaccttttcagttggtagttggttagctctacaaatacagatcccacagatagagatgaatgcttgcttcctgattcttttcttacacacacacccctataaaacatttggcttacagtgtaggcataatgataagttcatacaaacaactcataactggatagtgtagtcatagaaatacccctaagttgtttccttctggaatttttgcacttgattcttttgaacagagggtagcataattgatgccaaggaaggtgcatgtcatggaggacaagctggcctttgtggctctcttcctgtccccatccttgacacccaagggttgcatggtcctcttatagcccatgtgatactgagtcatgctgagttgctataagaggcttagcgtggcccaccctgttgccaggggagctgctgggctcctctcctcagtctttactcctgcactgccaacgcgtacttgatattctcccccatccgtgtggcttttagcattcatccagagtcgcggcttctctggctgcctctaatcactctgatttttccacttagtttctattttatgccacaggaatctgattacattgttaagttcctgcctctttcttgggagctggacagagtgtgagttttagcctttcagagaccctatctgaagagacccacatgactctgaccacacaactttatctatccaacagatggagatcagctgacctgcttctgagaacagatgcccctcctttatacagtggggacagttggatggtgcagaatgatagtgtttaggatcctgggacacagactcaatctgnnnnnnnnnnnnnnnnnnnnatgaatgaatagcatttggtatgataggatgtcagatggggagttgaatggtttccctgagtttggatggatggatgaagtaggtgggaggggggtggttaggttgttggagtgggtagatgggtaaatggattgtgtatgtgtgtgtgtgtgtgtgtgtatgtatatctgtgtgtgtgtgtgtgtgtgtgtgtgtgtgtgtgtgtgtgtttgagagagagacagagacagacagagtatatgtgttgtccatataaaatgggtagataggtagattaatagttagatggatgagtgggtaggtagatgaatgaaatgagaaaatgtttgtattgatggatggatgggtagatgcaatcaataggcttatgcataaatggatatatgaaactttattggtcatctagagtcagttcctcatcaaatacagaaattctttaattaacccttttaaacgcctctggacccctgccttcttatctccaataacttacaaaatatttcattaacaaacaccattgtcaacttttcaaagtcttactgtgattgtggagtctaagttagtggttaagggcctggtctttaagagctgggtttccagctcagcttaactaattaaagctgcatgaccttgaacaaatcccttggcctctctaagccatggcttttcatctgaagaatggtggtaatagcaaccttgctgggttgtcaggacgattaatgaaataatgagatcaaggccagaccagtgctccaaacaggtattgttattgggcagagctggcatgtccactcttgaagcttttgttcttcacagagcacctgctgtgcgttggattttacctgagcattatgcatctgatggtaaataagaaggataaagtccctcatctcctgcaccttatgctctagcagaatgctcagataataaacaagcaaacacataaacaacttcagatggtgctaaatgatgtgcagaaaattggaacaggtaaagtgagagatggagagtgaagatgatcttttattggacttgggctggtgacaagaagttgttgccattctaagctccagggagatggtatccaggaacgaggaatcactatcaaaacgccccaagataaaggagtttgtgtaggtaaggtaaaaagcaagaaatcaaggagtaagctggtcacgagactgctcagagcagaggtcagaggagaggctgtgtcaagtcgaaagcccaaccctgtggtttagacattactcctgttggttccagggggggggggttgtttggtttggtttgatgattttgtcattcataaaaaataggtgaatgatttaaagcatgcaggtttcactatgaagcctagactggcctagaatttgtgattcacctgcctcagcctcccaaatactgagattacaggtatgtgtcaccatcctggctttgaacatccttcattttaatcttgtcccctggaaagagccttcatctgacagccactaagctttctggtagccgccaccacacactcccactcccgggctactgaccaccaggctgagcagactgcattctcaggaacctcagtcgacactctgggcacttgaaaccatagcaacctcagtctggatacctgaaaccatagcaatgttctggacctcacaagcccaaagtctgccaaaaataaagttaaactacaagagattagatcagtctgggagatccagacagcaccaagtcagtgtaacttgtaacacactaaaccgggagggtgttacacactggccttggccctggagatggggattttctaaggctgatgttgagataagaggtgtctggaaccatttatccaggtggattggggataggatctggctcttcaaaggtaacatatgatagtccgtgagagtggcagatctccagcctggatgatctggagctcacccgggtcattagggcttagatagcagcagcagcctctcagaagagcttccctctgtgttgggtttcttctggcaacgtctctccatgtaggaatggaaaagttcttaccatcttccagtttgatgtgcagcaagaacttctttatctgttagctcccacaaaaacaaaggcattgtctccttggcaaactgcttgtttgactcaaacatccatccaaaaagtgttgcacgaaggaagtgccaagttctggccagccagtcctgaacactaggccacctctggattgataatcaggatgatgcttcctacatctgtagacggagcaggggcaagagaaggggtcacagaaaatgtaagataaagggctgaggaaatagttcagatggtaaggtgcttacagttcaagcatagagacccaagggcagatcctcagcacctacgtagccagttctgcaatcctcgtgctaaggaggcagagacaagaggatcactattgccgtgatgaaccatcatgaccaaagcaacttgtggagaatagggtttatctggcttcaacatccatatcactattcatcattgaaggaagttaggacaggaactcaaacaggtcaagaacctggagtcaggggctgcttactggcttgctcctcgtggcttctcatccttctttcttatagaaccccaagacgaccagcccagaaatggcacatagtgggctgggcctttccacatccatcactaattaagtacagcctgatcttctggagcattctcttacccgagatcctctctcctcagatgacttcagcgtatgtcaagttggcataaaactagccagcacatagtcaaatgtatgtatcagtcttttcaaactcctgtggcatagagagaacaacataagccccgcagagtctcctaccacctcctatatggacagcacaggggtctaggacttgcttgattcaactgactcaagctctaggattctatacagatgctatcaatgttcctgtcccaggggaaggggaggagaccgttcgtactttctaaagggcagaccatcctcaacctcgtctctatggtcttctggttttccctaggcaaagccaacaagaatgtccagtgggatgaggatgctgtggagtacatgcctgccaacccagtcagaatcgcctttgtcctggtggtccatggccgtgcctctcgacagctacagcgcatgttcaaggccatctaccacaaagaccatttctactatatccatgtggataaggtaaggagccactattcatatccctgtgctgggcttcctctgcagtctgtctgtccatctctgatccttccttccacctcccaagtccaggctgaagtttagagatagaacagcagcatgtgattcctaagtgatctgagtttgtgtgtgtttgtgtgtgtgtgtgtgtgttagtttcagaatgtttcattgtggtgctcagtttttcctatagaaaagcttggttgtttgtctttttaatcttcctcaacacatgataattacacatatttattgattaaaatttgatatgttgctatatgtatgcacagtgagctagtcagttcagaaaattagcatatccatagctttaaattcctttcatttctttgtgctcagatcattccagacgctcccatgggctttttacaccatgttctgcattgctggtagtgtttgtcttcctcctccaaaacataacataacacacacacacacaaatttcttaggcaaaacctagctgtgctgtgttttgttttgttttttacctcgtcctttccctgtctagtgcacactgcctgccctcacagatctgtgaagctagctatcctaggagtgagctcactttttctagagaagtccaggtagttaaaatatccttttagaccatatgctaatcagttcttcccttgcctggctgcagacacagacaactgtcaatcaatgggcgtgcctgtatgctaatacaaccttattaccaaaactcatacttggcttgctgacccaggagccatcttttcctagaagtcccattaatctgttgatgtcacaagatatgtgcatgtctagaaccctagagcgcctaaggcggaggcgggaaggttgctctgaggtcaagttcagccccattcttctcagaaaagcacaggttgaggttctaagacagtggtagaattctcacctagtacaaggcccagttatagctttaacactaaatgaatccaaagaggtaaagggctattttcatccctaagatgtgtttccagtcaccatgtgaaacagtaagggaagagaggtggtcctgaaggacagaacatagaaaccccatctcttacccacaaagactcatcaaatttagataggcccgtgttcttgagcttgatacgttgagataacatgcagcagtcatctaatatcatgtagtgttctaggtccatcacctcaagcccactggttaactaactcagcagtgggcttaaagaatatcaacttaagtagccagtggttaatattggtatagaaagacactgcaggcaagcatgacaacagccagttccactgtgctcagacacaccagctacaagggacagggggagttgggatgtccagtggctgatgttctctaatctcctttctccttctctctccttggaaaagcgttccaattacctgcatcggcaagtgctccagttctccaggcagtacgacaatgtccgagtcacctcctggaggatggccaccatttggggtggagccagcctcctgtccacctacctgcagagcatgcgggatctactagagatgactgactggccctgggacttcttcatcaacctcagtgctgctgactaccccatcaggtgaggcagttgccggctccaagccccagttccagggtcctgcttccctcccctcttcccgtaacaacagtgaggaaacaaaaaagcagtcagcttcctgtccagtgaagcatcctgcatctctatgagatgcagctagcattgcattcagagagcagagggcagaagtgggagtgcattgtattcctaatgaaaaaggccaggagaagccttgtgaataacaatagaagatgaactagaggtgctgccttggaaagtgttccatggcagagaagagctgggccagtcctccctgaggcaggaacatacctggtgtgggcaagaggtggttgggcttggaagtgatgtaacagataatgagggatagagtaactagacacagagtcagagagtactcctggggtatgtcatcaaactgttactccaagccaaatgcaagtgtgttttgagcggaggaaagacagatctgaccttgatgttgagctcaaagcagcctattagaatggcagttgcttaaagcagcccaggcaaggtcacatataggaagtgagaaagaccctaaaatatattctagagcaagatgtgcaatcaaggatggaacacagaagagcaggaagaacattctagaccaagctttgtaagccatgcactattgatgtttgggctggcaaattctttactatggggcttccccttgccctgtcaggtgtttatctgtgcctttggtctttacctacgctcctaatagcatgttctgcccacctgtattcttctcacacaatgtctgacgatgttgccagatgtcctgtgggggcctagatcacctacagctgagagtaccacttctttatatgagaaaacataatgggcaaaattattaataaaaaatgaacattttgcatctgagaaatctaaaactggatggagtttagtgaacaagagcctgatgaaaggtgactttagctaaacaagaatagggcaaggggttgtcttccaataaaggactgaattcagaaatttctccaaaatgcagtatatagcaactactgcgggagggcattccttgagccttttagagaacccagtagttaggtggtcaaactgaggtccacagtcatacagtgaagacatgacaaagcaaggattagaaccagttctgtccatttccaaagtagatgttctttctgcttgaactttacctcttgggaaaatcgggagactgggctgtctgtaagctgcctagaaaatgcagaaggaagcaggacaggtaggcatacccacagctgccacccccaatgctttgcattaattgcagtcccagctgtaaccatgaccactcacccaggagggtaagggtctgagaggatgcaggctcagactctcaccagactgctcagcatggaaatccgagatgagttatcaaagcagcagcagacttacagagacattaattcacccatgtgataccaagaggcagtaacagactctagcagagcaccaggcattgcaaggcacattgcaaggtgcacatcagctgttggcatctaagttgcagccgagtttgcattgtttatctttgcaagggccccagctgtctttctcagaccacgtgctgaaggtgtgttcttcctggctcctttagctttacaactcagtgtttgtgtctctgcctggcttgctcttcctccgtctcccaggtaattgccagagcgtccacccaccctctcagctcttctgcgcactctgtcttgtcagcctcaaggctagcggcagctcgtgctccgggctctgctatttcctcttgctgttgtttctatgaagtcgccccacacaaaaacatatggattttgcagatgaatggtttcatcctgggcaactctgataggtttcacgttccatctgctgttccatctgtagcttctaaaacaactccttccatcccgggaagaataagaaagttaagagctttcccaaagtggggtggaagtgcccactttagacattttcaagaggctttgaggacttcgggagtcttcacggacagaagcagcctgaggtatccactctgagtccccctccccctgcccaccattactgggcgtacagcctctcttccgaggtaattaagactcactggcatgttagctcctggacacgggtagccatgtgagttggtgcatactacttcaattgtgtatgctttaattttctaccttaaaattgagcgtggcagcagtgcttcttgcaagagattgttgggggaggaaaatgaaaaatggtcccacagaggcaacacacagagcctgatgcatagcaagttctggataaacactggctggtcacagccatggggtggtatgtgtatcacaggcaggacttcacactctccctcccttcaaaatatttccccctttcctctgatggagtgaaaagacaagtgattatttcttgactctcatcccttcccaaggtgtgaaaggcagagtgagtctgggaacagtgtttcaagagaaaacaagacatgattcgtgtgtaaaggagattcatgtgtgggtaatggacagactaagtgtgctcacacaccatgctttaccgtcccgctgttgatggcagtactgccctgtgtaagctctggttgaaactagtacatgcacaatgtatagttagacatgagtgttcccaagttctagttctcatcaaaaggcatgctcaccgtatttctcatgtcttaccaaccaagaaagtaaccatacctatcgtccttttgactggccacatgtatgtggggatgaggccatgaacatttctccctcttgtttggtttggacctgcacagagacatccatcgttcggacttttgctttagcaaagggtagaaggttgaatatgtccacagccctgctcagggttcatactctgcctgtggtgtgtgtgtgtgtgtgtgtgtgtgtgtgtgcatgtacatgtgcatgtgtgtagcagaagctgttgcctatgggaaacagtgttgggatatttaaagctaaatccaggatttgccttttctgcctcttggggacacagggctgtaacatgtagcacatgggatccactatgtagacatataagttttgttaatcatagacgcaaacctgtgtcttgagagagtaccagtgttggggaccatgtacttgaataaattagcaaatgcaagtagataagacaggaagcaggtagccagacctctctatgatctctccaaatccgatctgtatgagacctaacatggaagcactcactgcatacctattatgttccataacctctgttggggaatttaacacatattttgattctcatcctataaaagaaagatgtataagaagcctactagtagcttcacaggcttactgtgagtcaaagccttgtcaagatcagtggtttaacagacatactgtgagtcaaggatctggagcagagctgaggtgcccaaagattggaagtcaatgtgggcacccaaattctgtgctcagtcattcctatgtcatcatcccttccatctctcattggctcgtgggggtagaagaatccctgtgactgacatcaagaggtagtcacagacaggagtgcacagcccatgggtgcacagtgctttgtgggcgccaaccttccaatgatgctgtaggcaaggtgtatttccggtgtaattcttgcttactcctgaatctctgctgaacaggagagctctctccagcagttctggttgcctgggacagaatcagagtcacaaatagaaatcagagactagggtttgaaatctaagcttcctttatcttcttcctcttggtcttactgcccaacctcttgtagagcaattcgggggtatattgggggtggaagagttcaagccgccctagtgaggccagtggagagaaccctatatacccatgagtgaattcagcagatgggactccttttaacaaacccagaggtttcataggtctactgtgagtcaaagtcttgacaagatccagtcaaggtcttgtgatcaaacagaagagctaatagaacaggaccttgagttcacttgttaatctgttgtttccccggtgtccacactaggaagcaggagatcttatgtccatcttgagatatagtgttgatggctatgggagaagagatggaagggcccacatagaggtaggaaaaccatggagaaggtcagtgcttctgatgctcccagaaccatatcaacagaactgctctcaatctccaggcagaggcaagcatccagaagccataggagcttccagaatccatgcagccatttagcctcacagctaatatggccaggcagccaccttctgcttggggaactcgagccccacacctgcgcagacatcctccttcaggagactcacagagcatttccgtgggagatggagcaagaacagaacagcccagtgacctgagacaagaatttggcagagcaggttcataagagttgcttgtgagccagagaaatcacagcctatagattcgagcagaatggaggttgtttggaggtgtcttctcttcgtttcctcagccattttataattatggtgaagcagtatgtaacttgaaacttactatctctgtcatctgtaaggatgcgaatgagtggtgctgagtgtgtgttcttgttgggcaatcatcacacccatcatcccaagggctgtcttgaccttgtaacccctcccaccaccaccctcccccgccacctccagctctagtccttggcaactgatccatctctatgagtttgctaactctgtggaccccgtgtgagtagactgtgtgtggttcgtaactgtcttatttcacttagcagtgtgtcctcaagtttcagccatgtgcacttgtgtcagaacggccatctttttaaaagttggtgttttctgtgtgaccacatggaatgattctaactttcaactatttggaataatgctgtcatcagccttgatgtagagatatctcctcaggacactgtctctattccttaactgagtttgtatattgttcaatcatatagtcatccaatcttggtcttttggtgtaacaaccataatgctgtccataatgacggcaccattttgaattcccacagtactgtgtgagagttctggcttcttcacatcctctttcacactgatttgtttgtgtaaagtaattatcctaaggagtttgacgtctctcttgtactttttaaacacataaaccctaaaagcccaagaacccttggacagcttatatacctgtttgtagaccagataaggagctgtctcccaacaagagcttgcaacccgttcttttggtggtggtgatggtggcaatggtgatggtggtggtggtggtggtggtggtggtggtggtggtggtgatggtgatggtgatggtgtctaagtacagatgcacatgtaccatggcatgcatgtgtcaatcagaggacaacctccggtctgtcctcatcttccattttgttagatacagggtctccttttcactatcacatactctaggcaacttggttcatgagcttccaaggattctctttcccttccctcttacctgaccacaggagtgctgggatcacagacactcattactgtgtctttctttacacgagtccttgggatccaaactcagctctgtatatgtgtatggcaagtattctacccactgagtcatctccccagccctcaagccatccttctagaacgtcacccctgcccacagccatctaacttcacatctccccagggcaggtagaaacttgtgtacccttcttagtgctgctgaacccagcatccacccacacagcctaatagtaacctaacagacactctcatatgcatcctcacttcagatgccctccatccacagccaggttggacccttgtcaactcagccccactcagaaacccccaggggatcacaagctaaaccacacccagagagaccagaatttctggcaagcttttaccaggtagcttcccaggttgattccctggaggttggaggctgtagcagggagacatttctctctcagtggggcttaaccatcattatgagttactcagtaaggaaaatctgggctatgagtgattctcagaaatccagggctctgctttggacctactgattacagagtctctatgtataaggatctctgcacatttaaatctccgcatatggttgtaatacaaggaagagggccaaaagccactgtcaggaggtgggggcagagacattcatcacagaatttcagaaacagaaaacaaataactgctgtgataggaggtatgggtactggagagatggctcggtcggtaaaacgcttgccagcaagcatatggaccacggcttaatccccagaccccatgtaaatgatgttgagtgctttgtaatgtcagtgctgaggagatggggaccaagcagtagatctgggctcactggataaccagcttagccaatccttgagttgcaggctaataagagatactgtctcaaaatacaaggtgaacaactcctgacctacaacacctgaaacttcacaagtgaacacacacacacacatgcacacacatgatgcacacacacaaaaacaataaaatatatgagctgcaggaaataactgagcttgccaggaaatcttattttagggtgccagcttgggtctttgagtgtgacctgtgctctttcagcatccgaaccacttttatctgtgagtgctcagaaatgcacaccctctttcctgagaccctgaagccccagggacaaaaacatccaacaaagtctcctcccagataatgtgggatctgaaagggtgcacctgctctgccgctgctgatgcggggactgggatagcgagccttgctggtaattatgctgttaacggccttgtttgcatctagtagcaaaataaacatatctctaggcctgttatttttccagccgacagcccacaccccctacactcacatccctccgcctttgcagaaatgccacttgctttcctcctgcctgatgctcaagcattgttgatctgtattttagatcagacagctcttgggtcttcttgaaactaagacaaacccccccattatctactagacaaaaggggagcagctggagcagctggaattctcttgagagcagagggaaaacattcaggttccttgggaagccacaagtggtcacttgggtttgggacatcatctgtaaataaggatggagatttctggagggatggagaggatgcacagcagcagaaggaatgttgtagaacaaagggcaggaagtggatggaggtttgcctgagcagtgttgccagcaccaagtgctgcagtttcctcctaactcattcactggctttcataggaccaggagactgtgcagcctcctgggagagaattggtgtgacttcctatcacatttcttctttaagaaaaaaatcaggtgctggagaggaaggtttggatggctcactcttgagtggtactaaatctactctctgggctgcaatctagcacagttggctccttcctacaaaggctgctctttgagagactattggaatccaggcaatatgctaatgcagaaccctctagtgacacatttaggggtgatgcaaatgcaccctaacacatcatccaaagcggtggaccatatgatgccacaccaaaaaaaattgaaatgtgcctcatggggcaaagcaactaacttctaaattttattttaacataaaggttaatggttacccagaatccttgtttgtttcacggagcgcaactccactggacaatattaattatttgcttttataatcccaaaagaggggtgagccaatgtttcaaaaaaacagattgctacaacgccctgctgatggtctcaccagatctcaggtctatggtatggtgaattttttaaagctatttcatcccagtttcttccaccgtagacctcaagggtctccatcttgtcctggctgttcctctgtggccacgggaaggaatggtgcgtgcaaggatgctctaagtacatgctgaggatttgaatgtgagcctagggtagtccatggtgcaggcaaacagctctgtggtgtctgttttccctcttgcctgttcctgacacctgtgaacaggtagaagttcatttcaagggcaacctggatagatagcatctcttaaaatgtcaagtggaacagggatttgtgtttgctgcttttttatattgatgatggaagagattcggaggagtacagggcctactgggcagagttatattacaaccgttagatgaataaatgtaaaatgtgagtttttacatctttattatgtatgtctcctcccttggtgacatcctgcatcatggctctgcatgctgagtaacctgtcagggccctaaaagtagacgcccagcagaagccctggagatctgcccttctcccgtagacaatcacagttgatgacatttctaggagcttagtgggcaagatatgctgggccatgtgtttgtcatgcatgatccatggtcattcttggaacagcctcgggtgggagatgccaccccaggatctcattgtacagatgaacaaacagaagctgtgaagtaagagaatttttcaggctctcaaaactcgggcatcaggactaggattcagatctgtggtgcttccatcactggggagaaggaggagctgagttcttctcaagcagttcctgtcactctttaaaaagcatcatcttcatcatcatcnnnnnnnnnnnnnnnnnnnnagagagagagggagagagagagagagagagagggtgcggttattatgggggttagaggacaacttcagaaatctcttctttttctaccttaggttgtagaggtcaaactcaagttactgggttttgctagcaagcaccttcaccagcggaacaatctcacttgtcctaggtcctctcacacttacttcatagctctgacccgaagctctgtggtcatttcctccccatcctagtccctgctggatgagagctgaggagagggttacacacaacagagccaagagccaaccagccgatcctttctgccacgtccttcctgcaccctgtgtgatcacacgaaaagggcactgagagtcactggatccagctaatttgtacaaggaccacagtccagcagggactgcagcaggggttccatagactgccaaagtaagggtgctctgcatagctgacctgctctgccactgtgtcgcataggcagctgacgccaagggggaagagtcagtcactcagaacactaatccatgccttcacagtctgcatggggacttgagggagagtgtttgccccaagcataaacctagggaccagctgttctgcctccaccagtcgcaaccatcacagccctccgtaagcctgcctgctgaggcttggactctacagattctgcccttaagtgcctggctgtggtaatccatgggattctcgggcatttaaacattagtctaattcaggcgcaattaagaaggaatggttgttatcatttccaatatgcaataatcattcccatgcaataataataataacagcaacaataataaatatgctgacttttttactctatcaactgctctaccggggcagaaaagaagccatgtgacctcagcctcctccatgttagaaaaaaaatgttccccacatgcttaaaaaaaaaaaaaaaaaaacactgtttctgggtttggagacagggcttagaaggaggtcattcaggtttactgaggtaaatgaggattggttccaggttctacagaattaggcaaatagacaccaaaacaccatctttgtttctctcctccttgagagaaaccagcaaaaaagtggccatgtgcaagctggggtgaaggcctaaactggaaatcaaatgccctaggactttggtcttagaccttcagcttccagagcgatggggaaagtgtctgctgtttaaacttcccagtctgtacaacctgagctaatacaccattgcccacctcctatcggtactgtgttctcatgatgactgagggcaaccttctgagtctgcattttcataccctcaaaaggaggttggcaccactgtctgtggcagagcgatgtacggagcagtgtccaatgagaacctgatcattgactgcatctagcttgctgacaaaatagccccatgagcagaaggtctcaggcccaagtctacattcccaaatccccttcatcgccacaatctaaacatggttatgctcaaccgtgctgatgttgcacaagaaaacagctgagactaccatcttgtcttggttaacatgcctatcagcccagcacaaggcaggaagagtcaaaatggaaaaatgaggctgatgttgacctcaaagatgcaacccaggccccggggcaagaagtatagggcacagcaatggtactgagaaggaagtcctgatggcatctttccactcactaagtgatgcctctgaccttgaggactgtcactgcctccccaggaggggacgggaggaagatcacaggaggcagcttggtgacctcttgctgccccaataggtttgttatggtcatgggggtgtattaatacagaattggaaagttttgggtttttttttttttttttttttttttttaacaaggaaatcgctctcctctgaggacaatgcagatacgagctaaaaagccccatgcaattatgaattctagacaaaaccatggtctggcctgttagtagatctcctctgtcctctcacctttcccgccatctcatattttccttttccccacccttagactaatgcggaaatattgatggggcatgcctgtgaggagctcagggctgggggtgtaatctcggtctatacagcatgtgtggtgccctggtttttgtcaccagcaccacagaaaccagtggagtgatgtacatctataatcccagctctggctaagtgaaggcagggagatcagacgttcaaggccacccttctcctctgctacaaagaatattcaaggcctgggatacataaaactccacatcatagaacaaatgactttcaaacatgggagtggagaaagtagttgtcttcgtctgcattgagcctccaatggcctcctctcctctccatggttcaggatgctcaattcctcacgtgctcttcagttaatacagtctgccagagcttcaagtagaaaccccctcccaatctgtcccagtgatgtcctcattagccttaccaatggtacctagtctcagaacatagtaggctgcccggaaacactgcccaagtatacttcacagtgtctaaaagtggattggacgtctggactagtcactagcttaggggcatggtcatggcttagatcttaggccccatcactatgagaatgacccctgcctaccagtgctgaaacagccccacagtccagattaggcagctggtttctggacttggccctaccccataatgctggtttgtcagtgggaggagaataggaagaaagcccttgaccactctaggtagggttgtgggtccccagtccattccaccacagtgcatggccaatcaaggaggcgagatgagggaagattgttcttaccccaagccaccgatgctgctgccagggtgggtgtggactatagcaaagcaccaggacactgctctgggggttgggagagcacagtctgagatgcggggcagccagagctggctcagaggaccaccagcctgtgaagtggctggtgctgtggacttcccaggcttttggactgccaggtgccactggaagttgaggaagaactgaaaacagaatctgggcctgcgggctagatctagccttgggctaggggaggggagctctggctggtcccactgtgattatccttggcttgatggtggcagacttggcttggtggcagtcatgtctgcgagtgcagagaggccttctatgggagattagacagcgactctgtaggcaaagaccttctccatggctccccacagtggataccaatgaaaagagacagtctctggttccaaatcatttattgctatggttgaaagtggatgcataaaaccataccctgcttctcagggtgagcctgagattaaatacctttagcagggagaaatatctgggaatttccaggcctctatgtacctcattagaatggcaatctctgtcttgagcctaagtgaccacaggtcatgttcttttcctcggctatatgtggaggagtttggggtgttgtccttacatgactgatggacacaaatccatatggggctgaggctagtgacaggggcctggtgcctgggagcaggtgaagctcctatcatcctttcagggtctctgggggttctagccttagctcaaccaaggaccaggctacctctcatggtctactgccccacagaccatagcagccagcatttccattaaggaaggtgatgtgtaatgtcagcactggtgttctgtttctctacccaggagtaaaaaccatgcccaagagctgctgcccatctccagggcctcacctcctcccgtggaggattcttctttgccctctttaattgtgctcatcactcaacactccttggcaaatcctgccaggggcgcaaacactgccacccctttctcaattatgttccttgtgctgctagactctggtctaaggccagacgatttttgattacagagtcaatctttgtttaaaagttggccaccctggggaagtttctaacaagttctttttaaacaatgaattttctggacacctttagctaaagagttccgttgctcagatcactttcgaaggtacagcataagcattaggcagctggggcaatgtcctgaatgagaggcatggatgcatgcaagaccaagagctgtagcttcatcttcactgagctagctggagtcagtcatctcttgtgactagactgaacactgacatctatctgtaaggatcctgactatttcctggtctctctttactgcttatccatacagcaagagaggaccttcactgtttctgtttatgagacaagagatggtgagaacgtttccacctgctgagagccacagatcagacttcgatcctcccatgtggttaacactaagcctcagaatcttgagtgcggcccacacactcaaggtttgcaaagacctgagacatggtgagatttcagaagtgtgaacgcttagatagttgagcacatatgaggaagaatcaatgcacccaaccggacgttcagaactggaaatctttcttgaaaaagtctctgattaaataagaaaaaaatattaatcaagcaacaatacaataagtaggtggctctttgatcatttgggaaatctctattgaaggcctactatgtgtaagccactttgctgggtgctgggaaagtatagtgctttgatattccacgcttgtgggttgaaagctttatgagcaaagctactctaaagaacagtgtgaactaggaagacactggtagaaataccagaaagttcaagagttcaagaccacccttaccctcagctacagaaagtattcaaatccagcctgggatacatgaaattccacatcacaaatcaaagaaagccaaggcatggagaaggtagaggaataggcaaatggggagacacactgtattggataagggactgatcaacgtgagtgttagtgtgtgtgtgtgtgtgtgtgtgtgtgtgtgtgtgtgtgtgtgagagagagagagagagagagagagagagagagagagagagagagagacaaagctttggttgatgccagacatcttcctcatttgttctccactgtattctttgagacagtatctctcactagaccagaaacttaatgataagctagactggctagctggtcagtaaactccatgcattgtcctatcaatttcccagcattagagtaacaagcacacaccaccatggtaatccaaattctggtctacatgtctacccagcaagtatgttacccactgagctgtctaactcctagatagactttataaagggaaatgtttggtcctgtgagctgcattgttcaatggtctctacattgatgaaattcactgttacagcaataaagcatccacagacaaatatgtaagcaaatggctcttactgtgttccaataaagctttatttacagaatgggccatagtctgcagactctaccttagctcatccggacatatctgccaggtttcagatagtggccttgttcagaacacatgtctcaacctttgcaagtctagtcctgaccattcacacatttccctggatgtcactgtagatggcctcttcagcctgtgtgccagcttttagtcccctcgcagggtcagtcttcaggatcccagatgatagcacattaccaatgccctctgttctgtctcctctgcccttgaacagcaacaactgatgcaccccagtgggcttcttcttcagccttcatctctagcctagatgtagcttgtgaagtacagcccttgcatcagactgtcctgccagagccagccaagaagacaaagatagctggcttgcaggcagaagtccgtgtcattagtttagtctagccccctgctgtaaaactcagccagagccaaccttctctgtgaaaactcatcattaatacctggtgctcattagccctgcagttcaccctgcgccaccagcctcagccagaatcagaaaggctaatggcactggtgccaacagtcactggtcttagctcttgccaagatctctgcttacacacaaacacacatgttgcatgcacacacacaagcacatgcttgtatacacatgcttcacttcttggttaaacattcgtgtttctggctaatgccttaatatcttcaaatgctccaagatttcccagaatccttgtcttctttctgtaacttggtaggtcttgtgtctctgactccttactgtccctctgcctctatctgcacaatctcttctcctgtaattggtctctggagtctgcagcaggtggcaatgtcattccaaagagagaacgaaacactttcaaataatgttaaaaacaaaatgcattttaataacatcagttttaaggcctgtctattcattcattcattcattcattcattcattcatccataccatcaagtcaactagcacttgcttagtgaagacctacagtgtgcctgacatttgcctggccccaagacccctgccattaaagaacatactgatcaggccattaaataattatacttttatgacattgttgcaaaagagatacgcaagcatactgagtaaaatgttatgcatggaatctcctctattctagggggcagaggaacttccctggagaatggattacctttgagttgagagttgaaataagaggaaataactgagtgatggagagctggggggtggggtgagcctggctgtgcattcaaaggtcctcaggcagaagagaataccactcacccagcaaatgaaggagcgctgacgtaagcagtgtgtggcgatggcgatggtcaacaacttacaccctgagaggaaggtggtcagaccgtagggaaccttgaaatctatgttaaagaccagagtgtgttctgacggcaacaggaagcctttcaaagtttctttcttaaattgcacagtgccatagcaatagtgccccagttcctgatcattgtttgccaggaaggagaaagatggcggggaaaagtatagaactttgccaggctccagaggaggagaaattgaaatgcatttttttcctgctagcccaggtagatagatatggtatatctcagactgtgcaaatggacaggaatggtgtatcccagtctaggaaagaggatgataagtacagtagaccccaggctgtacaggtggattactacagtgtaccccaggctatgccagtggatatgcatagtagagctcaggctatacaagtgaatatatcccatctagctcagcctaagcagtatatcctggcctttcctgtgttggtattaaccatagcagctcgtattttaggcaccctgttcccagtggcctgagaagaacatgaagctgaacctaaaacttctttcctctttggcagaacttcccatttgctcaggccgtcagggaagtgtaacaaagatgggtttgagtagtgtggagggaaaatcacttgaccacccagtgcctcggttctctcatctaagaatgaaacaaggcaagttccctccctctgcatttgctgtgagtgttaaaactgccatgtgtgaggtgcctgcttaactcagagagggtaagtcaaccagggacagtggtggcagctcagagagacaaccctgcatggtctgcaggtactcaagggcatagagcacatctgttctagccaccactgtgccttcagtgcctgctacagcacctggcaccttctgaatgccatggaaatgaaagcatgagcccccttggtgtcattgacaaccccgtagtgactgctgtctcagtacaggaagagataccagatgagatgtgttgctgtgctttttttaaaccagaattaatgaaaacatgcctgagttgggacccacaggtttgtctttacttaattgtccctgctagaggcattttcggatctcaccactgtaaaaatggaggacatctgaaaagccagagggtccatttcaaaagaacaatgagccgtgctgggttcccataaatcctgctcagccgcacctctgcttagccagaggagcctgaacagagcctagaagcttgtcagggagcccagcgggacacggggacctcctgataccaagcctgcctggctcatgcaagctttgtgtgttctgagacagagtctgagccccacacaatccattgtcacgtggcagttgcttattgtccctgtcctctgagagaaaggacatcagctgctgcccaacttccctccagtttccattaactgaatcaagtggtcctcagccctctgtattcaacagggctttagttcaggctctctggttcgactctttgatcctgtttacaagtagtctgtttagcaggagacgtatccttcgtgccatctttacttcttcctctgtaaaatgggcttagtaggcagcactgatctcagaagcttgttgggaagagagacacacttacagccgagagcacattaacatgcatgctctgcagacgctcatgttgctgtccatactgacccagctgccctcgcgctgggaagccgtgtttgccctgctgtaagaggggctgcccacccaggatgctgtgactactcagctcaaaaaatctatgtcctatatgcctgctacagctactgtaccatggtcactgtgacagctgtgcattgataactttttctacagtttgaactttttaggctcaactactctttatttgtggtagcaaagtccacacgccataaatcccaccccatggcatttagtgccttcagtgtcatgcagccagcaccacctctggttctaggtattttaatcacctcaaaaactggtactcatttggcagtcactcttgggatctcccaagcccggggatccaccagtctgctttctttagatttggtgaccggatatgtcatagtaatcaaagccatatgtgtcactctgtgtctagcttctttgccttgacataatacattcatgattaatccaggttgtagaaatcatttctgtttcattccatttaatattccatcaaatgtctataccacagcctcttcacctatctttgtacattgaaggaggttcgggttgttcgcaccttttgaatagcactgctaagaaaacccacattcaagttttgcaagtgtgtttttcaattcttttgtgaatggtgatattttagtgtgtgtggctacgtaagagaaaggggagaaacactaagagggtggggtagaaagagaagagatttcagcttcccctttagaggcctaacttctaggatgcttgtgaatatgcacagtgtttttcacatagatacaccagtgtgtgggtatgctctactatctatggtcattgttgtaggaccaaccactgaggctagactccggttgcttcttagcctcttgacacttcaaagactatcctggtatcctaatggctgtgtgtcatagcatggtatgctagggctggagacgtgggacaagccaacctcctgcctctctcagagtcaaataagtcacaagagctatcataatcaaggaataattatatgccctgaattagacgtttcatacacagggactatccggtcttggcctgactccaacaaggaaactgaagcttagaggagaaaagctgcctacaagacagtggtacaggcagacttcaaacacaggtcagctctgttcctgcaagaccagtggctcacctggctgtcacccatttggctcatctctactagacctgcccatgtattttctttagcctagaaggaatctaattcaaatgttaaaaaatccacctcaggaacctggcacaggatccttgggactatcacccagcagtctgtgcacatgaagcaactcttgtgtgctatgtccagctagggtgcagaatgtctgctagccttttttctaccacagcgcctgccttctctgttgtggagaacacaatcagctctcagcttttgcaagcatgttcctgacgtgtccctctattgatatggaggacctatggtagtccaggacgtgcagaaccagagctcgttctcaaagggcctccgtctccatcatggctctccccttggcatcttgaacaggtcctgatttatagtaagtctagcattcatgtttgctgaaggaatgaatgagattacagccacaagaacaaagcaggtgcgtgcttggccttcatctggtatatgccctgctttacaatgaactgcatggccttcttcccagtacagacatgtaaatatccagagatctgaaaatagctcctcaatgatcaatgcgcttgaagtattgcttctttaacgcagctctctgatatggcacctaatggcatttactaaatttttttttttgttagcaaacactgtgtaggttgccatggaaccacacagggagccaggctaagatattgaccctgagtaaataactcttttggaagagatagagattcccgtaaatgagtaaccttgaccaaaggaccaggtcgcgtacatttagacaaacaaccagggctcagttttcccgtggaaatagctccacctgactcgagaggaactcagtggcagagagcagaatttgcgtctgaagccagaaagcacagttggaggcacagagcatctacttagcatatgctcaagtcagagcctggcctcttgagaggctggggaaccacacctcccaagagagcagagcgcacagtaagtctagacactgagcaggcaagccagggtggagaggaaggcaaagaaaggcaacctaacactgaaaagaacagagctaacacgcatggagtgggccctctcttcccagggcctgtgctgacagcgtagtctggagtctcccttttaccctccaagctgccatgtttgccatgttatagtaggattccccatgttctagaggaagtactgctactcaaaaggaaaaaaattgtcatcgtccctctttcctaaaaatataaaaagagttaggcttttatggttgtggaacttttattgcaagcctctaaacctttttactcaatgcaaatttctcccatgacttatgccagtgtagaaacagacagaattgtgtattctacagagaagccttgggccagatgtcctgaggccacagctgcctggaagaggttggggtctgggggctgcagtctgataaccactgatggatctgataaattctttttaaaagaaaatttttttctaaaatcttctgtccccaagaagtgccacattacctactcaaggcctgaactctctacttacagactctgatctcttaaattttcgattcagctctgaggtaaacaaatacccttgagaacgtgtgggtggagaccatacaggaagtaacaattctggtctatcagagactctctgaagcagacatctgtgtctgtacaaagcttgcagaggtgggtggccacagggtttgttttctgtagaagtgtatgtggcttcctgtctgcctcaggagacactgtaaccttgatccagttctgacaagctggtagacgtagtgggctggccaagaagggcaaggtgagcagtggagagtcaccagccctttgagctcagccccaccctcagccagtatccaaactatatggtggtctgggagttaagtcattgtagactccagttctgctgacgtagtgatgatactaacagaagaagggttttcatagaaggactacaagttcttcctcagacctttctaggctgtgtcaagttgacagttaaactgactaggacatatgggaagctagaatttgtctaatcgaagaggatacttacttgatatgtctcataacagccagattacagagaattaatttgtaattaacaaattgacttcacatacacgtgtgtgtgccttgtggacatgcatgtatgtatgtatccaaaccaaactgaacagcatatttaaatattttgtttggagataggatctcactacacagcccaggctggcctcatgccatcttttctcatcaccttccagagtgctggtcttgcaggcatgtgctaccacagcaggctacagttttatttgttcatgcttctagcagcctcagaaccaaccaggccccttggtgctgatccctgtcagtcaccttgccattacagccatcttgaggaagggctggcgtgttcagagttctcactgatggaacatcagataaatggcctcttcagatggcatacgtgtgtttaaaatgagaaatgtgtttctcccaaatgctctgtgaatgtgtcaaggctttgcaaagtgatttgcaggtcccttcaaatgcaatgagcatgttttagtgccacatcattttcatgagtaacaaaaaggtaaatccaattagcagcgattgggttttattatccaggtggctctccagcctgctgcttgcatggagggagggacagtccccacagtctctgtgggatgctttgggtatgtgtctcatgattcctttcattgctggcgactcactccgtatcacgaggaccttgctatactgtgactgttgttgtcacccactgctgtcacaggcatgtggcataggacaggacctgttagggaagaggctgaacagttagaaagcttcaagtcaaatagtcccgaaattgtagtgggcagagtctgaccataagaaacatgtgccttgctaggcagtcagcacactggcctgcccctgagggagagttccgaagcccataaagtgcaagacatatcacaccaaactcatgtgggttttgttgttgttgttgttggtttttggtttttggtttttggttttggtttttggtttttttttttttttttttttttttttttccgagacagggtttctctgtgtagccctggctgtcttggaactcactttgtagaccaggctggcctcgaagtcagaaatccacctgcctctgactcctgagtgctgggattaaaggcgttcgccaccatgcccggcttcaaactcatgtattagaaagttaaggtgaatgcctattggaggtaggatgatgttccagccagttcacttgtcctgggtgcccatggtctgtaattataactatagcatccaggaacaaatacagcacccggaacgccccaaacaatcccccagtatcttctatgcacaccttgactacatttgtaaccaagactggctttattttctgactcctttgcttttcgtctccaaacagccttgaacttcactttttctattgtggggatctgggattcctgctcttcctcatagggagaagatgttgttaatgtctgtactaaaaatatctggggccttgaggaaataggcttgaaagtgtctccactgcctgtgcacccccaaaataaaccaagcaaagaggcctcaatccagtcaggagatggactgtcacgggagtgagagagatggctagctctggttttaggtgagctatggagaaagtcaatcctcacagggtatctgtgttaagtccgctgcacactgtgttaagtaactcgacactcgcaaaagggagcatgaggcttaggaaggtgatggctgtctcctgttcctaaagaaacaaccacattgccgggcgtggtgacgcacacctttaatcccagagctcaggaggcagaggcaggcagatttctgagttcaaggccagcctggtctacaaagtgagttccaggacagccagggctatacagagaaatcctgtctcgaaaaaccaaaagaaaagaaaagaaaaaagaaacagccacattgctgaatcttgcccaccaagtggaaagttgaattgactcatgtttgactgatgcagggaactgaggtcctgaagggatccgactcagtttcttccctgaagtgacagtagccacctgccttgcagggactgtccaaggtactgtccaaggtcctgcttatgcagccagatgggaaaccttagtgttgttacgtaacagatgggcaccagctgtcccagacatgggggagggggtagttttgcccacaccgcacctttacacgttcctgtgaggtgatttagtcctttagaatccctaacattattgatactgtgagaaaggaagaagccttgaccctcagcctggtcagcctaccctggcctgagcacccgcaagtgcttgttagttgctgggatgccatacccagtacttattaagtacctagagtatgtttctcttaggaacctgggattctgtctgctcatgaagtgtcgggttgttctcctcatcatatttgtcccgatattcagaggtgtggccgtgaaaatggtgtcctgtgctctaggggacatcttttatcttataccagtggacagataaggacaagtcccttcaaagggttatttcccactctgtcctctgtagaatattctgtgggtcttaagcaaaaagagccctccaagtccgaggcaaatcgggccctttcattgctttctctggatcaaaatgtcttacgtacccaatgtttcagatgacaatgatactattaaatgacagctaacatttgtcaaagacttaccctgtaccaggtgctatcatagaggtcttacatgcatggatctatttaatactccagcacctgaggttcatgcgttatggagacgaaagaaactcccctttaagtgtgggcattccaggagggcccccgaggagcagatagaggaggaacttgtcgcccagctgcatactcagcagagccgagcagctcaaacttcacaagagcatgcatagcacctgggagccagagaaggcacgttgatctcaagccatggatatgggtcagcaggtcaagtgcttgctgtggcccgagttcaagccccagtaggtgtggtgctgcgtgcttgtaattgaagcactgtgaaaatgaaggcaggcagatctctggggctcactggccaagataatcaagtttctgtccaaaacaaaccaaataaaaccaaaccaaaccaaagcaaggtggacagtaccagaggactgacacctgaggctgacctctgacctccatacagtgcacacacacacacacacacacacacacacacacacacacattcagaaagagaaaagaagttgagtttatctcaataggtcctgggtgaggcttaagatgcagtgtttctttctcttaaagatttatttattttttattttatgtgtatgagtgagtgttttgcctgtctatgtttgtaccacatgtatgcagtgcctatggaggccagaaaggggactcagatgacctaccatgtgggtgctgggtgtcgagaacagaaccctgtcctctgcaagagcagccagtgctcatgagcactgtgccatctttccagccccaaatgtagtgtttctcagagtagcttccggattgcaggccaggctgtaagcatggctccttcctgcgcacgcctctagtttttcttctgctcctgggatgcaattcacccatcctcccactcagtcactctctgtcattttgcagagtgggctatttatcaagagcagcagctgtaacatcagaaccaggtcccaagcctggttctgtactttccctcatgacctaatgtctctgagtccaaccaccagtctgtcagatgagagtgaaactcactgtatggcatcctcataaatatcaaaggaggtagagcacaggcagcctccggcctgaagctagagcatggtgtacgtccaaggatggccgtggtttgcagcctcactgtcttacttatggttcactcctgctttcagcgtttgcttacatattatgtattgaagcagatatttccatggtcctgacggttgcagcaatgggcacctgcaatcaacaagagatagaccagcctgtggtcagtgtcagtagaaaggtggatctggctacacaggtcccagagatgagtgatgggagccacgtggagaaatactgctctataaaagaaaagtgggggtgggggtgggagtctaagccagcaaggccggaatagggtaaaatgtcagatcatgagctgttctttatctgaaatgaacgaaatctgtaggcaataattgacaggagcctgagagaagcaattgggagagttggtccccagctgaatcccatctcctttttgaacaggagcagggattggctggccagagcagccattttacaaagagagggcaagcaaggagctacagagccacccagccaaatggagtaagaggtagttcccctcaccccacccatccagccaatccagcaagcccactcatcaaacagggctttgctttgaaagggggctttatgcaacagctccagcccctccccagccaccctctctccccccaagatgtcatcttttgagatgttttcatgtggaagcatcgctaagtaaattcactaaatgcctattcatccccatcagatggggacctggtgaagcgggaaatgcgaaaatggcccaggctccaaccctgaaagatgctttctggggttgctaaatggagccacagcaggctgaccctgggaggcctgagacttcccagagggggctcccggagcctggccttggccccttcaatcctcccacctaagcttcccccgtgaggccctgtttattattcctgctactgaggacccattcagaggttaacttatccttttattcatcaggacgacaataatgaactgtcgcagagtgtggcaagggtttggtaaataagagcggctgagacagaggagatggagtgggcttccggatggctgggaaagacattgcctgattttctttaataaagtcatggagtagctgcttaacgcagcagctccttggaggccacaggaacctgggaactttggccaccttggttatcgctgtccagactcacaaaggttggcctttagggtctatccttaagattcatctctgtatatgtcggcagagctctgcatctggagcaaatagatttttaccaggctgcatacacaggaggctcttcaggcatcagtcaccccaatatggttggcttctaattggtttttatttcaataagaggctgggacattgaccacatttctttccatgtcagatgtctcaactgctctgttctgcccccacacacacacacttctagaggtctgcctatgtcatccaatgagtggatgaggattcatattgacaatgctgaagagaggcagagaaatagagaagggctgagggctgaaggtggtacagaccgtgcacctatgaggtagaaagaacaaagcaacatgcgttgaatgtgtacctactgtgtgcccttaagcctacccatcatcctcttggtgagaatgtatgatgaacttattgtgtgctcagtgtgctcatatgtgagcagccaggaggaaattaatttacagagggccactcactgtatgagagtttggtgacttgtttgtcctttagtcacatggcaggctgggcttccacttcgggagcttagacattgctttctgagatactacactgattctcctaagcccagcattagagttacagagatgcacacacaatagacagagcacaggttactcaagcataaggacctgagctaaaactccagcccaggcataaagtcataaggagtagtgaacatctataatctaagcacttccactgtgagataagaccacagacagatgtgggggactccctagaaactcgctggccagacactctggggtacatagtggtgaacaggagaccctgtctggaacaagacagtgagggactaacactcaaggttgtctgctgccctcctttctcttgtgcatacacagaagcaacacacccacacacacaactcaaaaggaagatccagcctccctgtgttcccatagagcctctttcttcccatctcacccagtctggaagagtagttaacccctgctctttaagaagcacctcccctcccccaacagaggaccccggtgatggtgacgaaggagctgtcacatcagcaccatttacctgtttgggtttattcagtggaagaggcgactgcatctctggcagatggagacctgtgtgactgccttttaaaatactgtcacagctgtatgcacaagctgattagctgtgacggcactgtgaacgctgagattgatggtgataaatttgggataacaatgctgggaacgatgtcatccgtttgcacggcgcttcatattttttaaagctcaatccacagcccggtggttatcgaggactcgaattcattcactgctctctgtccactggaggggtcagttctacctcagctcatcggaacctagccattccttcagcctgcctgccttccttctttccttccttccttccttccttccttcctcaaacattagtgtcagtcctactgtgtgccaaggatgagcagatctgacgagattctttccttatgggccttatattgtaaggtaaccaagagagtgctttcaaatggtgataaagctgtcaagtcaacattgtgatgtgataaagctgggctggaggagtcaggggctactttaggaggaacagccagaaaagacctgtctcaaaaaatgacatttgaaaacctaaatgacaagaacaggccagaaatggagagggcataatggcctgtgcacagcaagtgtgaagaccctgagtctgatctgtggcattgggttgagtactgataactactgttgaccataaccaatgaagcatataagacactgttcttgtcctcagaattccctgaagagtagagtgtgtgggaaacggatgcacaaacagcctgtggctttaactgtaaacttgacaaaacctgcactcacctgggttaatgaaggactgtttatattgggctggcctgtgtcatgtatggggacaggcattgtcagaattgattgtcatgggaagacccagccacatgtgtgtgtctctgttcactgggtaggggtcctgacatgtatagcaatgaagaagccaggatgagcgtgacaatcaatcgcttgtctctgctcttgacggtggttgtggtgtgtccagcagtcagctgttgatacactggctttcttcatggacaataaccagggcaataacttttccctctgaaattgcccctttctgggatgttaccacactgcagccagaatgaaactagagcacagcgtgttttcaggcaatgtgacaggcccagggataggacctgccaagaagacacatcatcagactgtgtgctgtgtccagaacaggcaaatccaggaaagcagagtgaaatctgctgcctaggactaaaaatggagcaaaccccagtacctctgcagaggaccctgactttctcttctgtttgtttccacaggacaaatgaccagctggtagcatttctttccagatatcgagatatgaacttcctgaagtcacatggccgggacaatgcaaggtaacgcaccacagaggtggaaagctacagctggggcctgtctcgcaggtagacaactaggggaaagtttcctgggtgagagagagagctcaaagggccctcgtgttagccgaggacagacagaagcagatgcttctcaggctcccagcttttctcccaggaaatattttgaacttattcctgtatgtgtacgtgtgtgcatgagtgtttaggtgcatatgtgtgtgcagtggcacatgcacctgtgtgtgtgtgtgtgtgtgtgtgtgtgtgtgtgtgtgtgtgtgtatgggggtgcatgtgtatgtatgcatatgcagtggcacatgtatctgtatgtgtatgtaagggggtgcacatgtgtgtgcagtggcacatgcatctatgtatgtatgggtgtgtacaggtgcacatgtaactgtgtatatatatatatatatatatatagggtacacatgtatgtgcaggtatacatgcacctgtgtgtgtttatgtatatgtatgagggtatacatttgtgtgtggatgtacatgcacttgtgtatgtgtatgtatgggggtgcacatgtgtgtaggtgtacatgcacctgtgtgtgtgggagccaaaggacagcctcaagtctattcctcgggtaccacccacattgtgtttgagacaggaaccctcacgtgggtttaggggattgaactcagatctttgagcttgcacagcaaacattttatcagcagtgccgtctgtccagcccatttagaatcttttatgtcttggtccctggatcagagtagtcatggttaattctcacttggttagtaggtagactggggactgcatctcagtaacattcccacatgctgaaggtgtcctgtggtctccacatgcatgccatgtatgcacacctatatacacacacatatacacacacatgtgagcacagacccatacacaaacagcatcttttcctggtgggagagcgccccctggattctgacattgaatacaatataaaccctggtagttctagcaatcctcacagtctgttaatattttgcatttggcctttttgataattcatgtgggtttgtttgtttgtttgtttgtttgtttgttttggtaaagtgactcatgatatcttccatgagaatctagatttccaattaactacgataaaccttggagtccctcgacctatgtctgactttgctcagagctgacatgcaatccaatcccatgtcccccaggtcatggcagttcctgtctctgttcctgatatgactacaattgggatttgaatttacagtctctgtttaagagtgtctctgctgtggcttgtagagataataggttttgtgtctcaaagtttaccttgttatctcacagaagcaaacactaagctccctgctttgacctttcgaggagtcaccccagaatgcatgggttgcattatttcttcttttacctgtcatttcagcagctgactctgcatccaatggccccttcttgatcatattcttccactgtatttaaaggcacttcaaagctggtcagtgccctatgagtccctaccagttagcatagcacatttggggccactagtggtagagaggctggctggacaaacacaaatcactgtccctgtgggcaatctccctgctgagaccctagtactttgctgggcttcttggcccattgcatttgacattggctttatccaatgcagagtaagaattcatatttaaattctccgtaaatgaaagggaggcttcaagagctcaaatggattctctcaggttgcccagttggtaaatgtcaggactggaacctaggagtttttgacatcagaggtgtgtgttggttacatctagggataattatatggagtgttcattattagaggtgacccttatattagtagtcctctcccattggtcaagaataaaacccatcttctcctccttataacctatatgattggtccatgcaccttacatcatgggcaggaagccagctccattcatcaacacatgtcaaaaatcccatccacactagcagtactgtttcaggctgaccattctttagtctttgctcagtttcccaagtgcttctctaggaacttggtagcacaattaaagtcatggcctttgaggtcccacctcctagaatgaaatgctgatctcctgtgtttcaggctgcattgcactgcttgtgtaacttaacctctctgagaccatgcctttcccagtaaaacgaaaaagtcacagtcttagatagataggattaaatgagatgttgcctgtgatggtgaggatgatgatgatggtgatgctattgccatggtaagcataaaaccaaaatgctgctggtagggatgtatcccatatctcaagcccttgcatgtacacacacacactcagtgtgatccaggtgcaccagcagtgggcagatagttttaacatggctcagagcagtataacatattactaccacctgcctctcaaaccccaaagcccaagtatcacagatcagaattgctcacagattcctgcatttaccctttacatcctcagctgggactctttggtatataggaatgaagtacaatattttagtgttaatttgttaataaaatgaattgatgttaattgattaataaatgaatgagtgagtcacctacaaccttcttctctttgttaatcgagtcttcccttactgtatgtcaaggcttcccacagtccatctcccattgcctctccccagtaggcagggatgaggccagcttacctctggttgccataccactgctgtagcacaaagaattctttcggtggtgagtgacacaagcctactttaggcaaacttgtggacaaggagagttagtggaacaagtcccactgacttccgatttggctgaactgagcagctgcaatgaccgcataaaagcgagatggttccatagtcttgaatgttgacttaagtatctagctttaggttgtgaccatcaacaactcagtagctgatttttatcttacaagcaaggaagctgaatatagagaaatgttggtctcacagaatcagggcagggcagggctgggactcaatcggaatgaacagactgtgtccaaagaggccattctcaaaattcccgcaggatgtcataccttcctatgtgccagccctgctttgtgtcaatgtgccagatgcctgcttgcctgcctgcctgcctgcctgccttccttccttccttccttccttccttccttccttccttccttcctttttataattatcacctttgagaccattgtataatgtatgtcttagggttactattgctgtgataaaataccataaccaaagcaactttggaagcaaagggttgatttgacttatacttccacatcactgttcagcatcaaaggcagttggaactggaactaaacaggaccagaatccaaaggcaggagcccatgtcgatgctattgatgggtactgcttgctcctcatggcttgctcagcctgcttttctctagaacctaggaccaccagcccagagatgaaaccaccaccaatgggtgaggatcactaagtttaaagatgccctaaggcttgcctacagcctgatcttatggaggtgtttgctcaactgaagtttcctcctttcaaatggctctagtctgtgtcaagttgacataaaaaccagccatcataatgtgtttgattatattcatcttttgccccatgtcctctcagatccaccctcttccatacacactttacttagttctttatttttaatcctaaaaaaagaaattaaagccatcaaaaccaatttgtgatacctacatattcttggccttatgtctttttactggagcatggtcaacctaccaaaaactgtgttctccctctctccctctccctctctccctctccccctnnnnnnnnnnnnnnnnnnnnnnnnnnnnnnnnnnnnnnnnnnnnnnnnnnnnnnnnnnnnnnnnnnnnnnnnnnnnnnnnnnnnnnnnnnnnnnnnnnnnnnnnnnnnnnnnnnnnnnnnnnnnnnnnnnnnnnnnnnnnnnnnnnnnnnnnnnnnnnnnnnnnnnnnnnnnnnnnnnnnnnnnnnnnnnnnnnnnnnnnnnnnnnnnnnnnnnnnnnnnnnnnnnnnnnnnnnnnnnnnnnnnnnnnnnnnnnnnnnnnnnnnnnnntctccctttcccagtagctaaaagttgtcagtacctgcttagctaggggaaagacttcatacccgccttccatctccacacagggatttgatctggcttgtgcttgctcgggtcttatgcatgctgacacagtgagttcatgtgtgctgcctgctgtgtccagaagacaccgtttccctagagtcaaccactgtctctggcttttacagtctttctatctcttctccagcaatggtccctgagctggggtgggtggggtggcattaagtagcggtctcatttagagctaagcactttgacatcttttgtcttcttcacagtacccagttgtgggtcttgtgttagtctactgcaaatagaaatatctcagaggagagatgagacatgtctttacttatgggtatgattataagtcgttaggaatcagttttatattatgttcatttaacagagtaatactagtagtagttcttctcctatggtagagataacttgtgtagctataaagttcctgagctgataatgtgctaggtaagtccgaggaaacttctcagctccactggacttcagcattctcccctttgcaagacagcatagttgaatgagctagtttccaaaacccattccagtctggcatggcttgcctctagcctgactcttgtaagagctggtgacaagagcagagagcctgagtggcagaaagacctgagggacaaaagcaagcagttgtgtgcagcacaggttgcaggtacctcagttttcctttctctagaatctaacagccaccctgaccctctgcgcccatctctatacactggcaaccagttttgactttaggctctcactgggaggagatgtcatacaaggaaacttgtattttaatggctgccagattcatcccaactgttcctgtaattaaatgaatgggagtgctgtgctcactgtttccccaagcttccatccaaaaaaccttaaatccccaatggagtgactgacatgtagagccgtcatcattccctagggagtaccagctggaccagagcccgtgccctggagtcgattctgagccctgaattatggaaaagtctctgggagctccttgtctctgctcagatgcagtctgcctgagtctcggtgtggggacaggagaataaaaagggaaactcagccccctctgatccagcagcttcttgtgggacattttctgctctgtgcaatttcccagtcaccaggaagagtgcagtgtttgggatgtgatataatgcaagtggtaagataggaatgttggtatcagaaggtcatctctgctacagcccagtgtgggtctccagcatttagctctgactggccttgcgtctgtgtatagcaggcaaataacagcaacagtgagttggcctggctcatgcaggaagctgcacactttgaatatgctacaccattccaagcgctcttggtggatgctttccttcctattggagagaaacttacagctgagaactagagactcacaatgtctcatcccacccgccaaggtcttaacagcttgtcactgaccgagctgcagcataggctgtaaccatccaggtcaggagtcacctggcctctcttggcactcactgtgctcccacagaggaccacagagaccctctggaagccactaatcatctctgtatttgctccctgtaaactgtctgtaaactgcagtgatgagaataaggtcaacactataattttctagaatttactgaattatagccaagcatgatggtgcaggtctgtgataccagctgcttggaaggccgaggaaggaagatggcaagttcaaggccattctgggagatatagtgacaacacttgactcaagataaaagtccctaagaaggagccacatgagaccagtgagatggctgagtgacagtgtgtagccacagaagcctggtgcccaaagcccatggaaaggtgggaagagagaagcagtgccagagagttgtactctggcctttgcatgcacatcatggcgcgtgcgcatgcgcacacacacacacagacatacgctctcacacacatgcacacacacaaaattaattaaagcaaccagacacacactcaccacatgcacatacagagagaattagttaaagcaaccagatacacacacacacacacacacaccacagagtgacagatagagacagaaagacagacacatagagagggggagtagataatagctgtttattaaaaattaaaaccaaacaattaatttgtttttaaagatggctgacaactcatttggtaaaggaattttttgccaagcttgaggacctgagttcaatccccaacacccacatcgctgaaggaaagaaccaacttctgcaaactgttctcagacctccgcatgtttaccacagcatgtaatacaggcatgcaaacatgcatgcatgcatgcatacatacatacacacacacacaagggaaataaatacatgtgaaatatgtaaatgcaaagctgcataagagggagtgctcagcggcagagaacctgaggacacatgccaggccctgagctccatttcctgtgccgcagaaacaaaggaggaagcaaattaatgtatagcctctcgggatagttgctttgaataggaagcaaacggggatgatgatggagaggcatcttagaagtgccagacatgtgactccagctctcagagaagctcccagagtcttcccactatgggaagaacaagcaggtgtaggtctgggaggggatccagctcctgtgggaaacagcacaggcagctcctcctcttcctgtctggactcacctgccccgggcagcattcccacactgggtaccagaaagactctgagcagcaccaggcattgcccttctctgacactgaattaattctccagctccaatcccactggatgtgtaaacaggtaactgattaacctatagttggcgagtccacagggagcctggccaggagcctcctcctggtagatctgctgtctggagttcccttggtaccatcttgcgtctgcagagggtgggttccctcccctgactaacacccagcactctaatgtgagcacataattaatattgcatctctggtggagaaagcagatcgcattcctgactttgttatttatcacactcctggggtcccgtgagtttcagaagccatgtcaacttagaactctgcgttattcccaccctcacctcccagcccctgcacaggactgtgcatccatggcctcctatttgtccgccctgaacctttctgttttttcaagacagtgtgaaataggtttttcaccccttctcccacccccatctcctagtaaagactgcatgagaactcacacaaacactctctctcctgccccccatctctcctccctccccccccagtgaagactgcatgagagagtatatcatactgggttcacagaccctagactgtggtgtgtcctaggcaaagagtagacaacagtatgtactttgttctctgcctctagatgggagaaaaggacagagatgctgttctcaatcctgtctcagcagaaaccagggtctggaatagcaaagatgctctctggggctgataaaattatgactctccctagccctttagccgtgacaagtctctgcaaagagtggtcatcaaagatgctggagtctgcccagagcagaatctagtgcaaactcctggccaactctttggaaggcaaggcacacatttctcagaacccaagaagtaaaactgaatgtaagaacttctatttgaaattcaggaagtccaccctgaaggtgcaagtctgaatggggcccctagaaaaccttccttcaaagcaaaatgagactcttattcttggacactgtctctttaaggcggcagaaccgctcagatccttcatttccaccctttcagaggggccttggtgagctgaaacagcaaagatggagacagagacatcaagagcctgccttggagcccagttcaagagccctagctcttttacttcaagaaattacttgaccttccttggttttgccttgttttaggcaagtccttgctgtgtagctccagctcgcctggtgctcattatatggcccaagctgatcttgagttccaggcaagcctcctgcctcatttcccaattgctgagatttccaagcctggctgacattactcaacctttcctctaatagatctgctgcatgtcagatgttagagccattgggtgggtacctggttgtgtcatttctctgacttcctgattgtctaatgcttgcagctcctgcccttttgttgttgttgttgttgttgtccattcaccccttgagtaaacatttgccgagtatctggaatatggaatgcattattctagaggttacagcagaaaaaccaaagacaaacatctctgctgtcttgagatttacacctcgtgagcagaaacagatgataaataagggccttgtatatgagaaaaaagatgcagcgaagaacactaaagcatagaaagaattcaggaggctgggactgggtgtcacttatcaatgggagtccgttgaaggttgtccctgaccctcgcttggatgactagtgcttactaaatgctttgtaaagcccttgcagaggcatctcatttgggaggctgttgggactagtattatgggttcatggagatgtgctgagccaggatcagtacctggctcttcacatagtgcctgtgttgttttggcgccacctgttgcccagatgccccagggtaaccatggcaatgagaagtaaagctgaaaggatggagtgaacagaaatcccttctgtccattatgaatcctgtagatgctaactagtgctcagccattgtgggagaggaggcgggagccaacacctacaaagagagggtgtctgtagacttacgttgtcctccagcttcatccttcatgtttcatgttatgatgagtgcacaagacagggaaaataaaaatttttaaattaaatagttggctcaaagtgttgactctgctcccctgatgctcccagattcttggctgctgccatcttccaaagcaaaacaaagtcctcctcggtagtgcctgtggcatgagaaacttctgatcttgaggaatgtgatgtctttatttactcattttaaccaaaatgcatacttgcagcttattctgtttgaaatggcagtaaacatggaacccagtcccccaaggacatgagcatttcattttggagatgattcatacatgcatttgggtattatgatcccggacagcacattaaaattacaacatgctgttagcccataatggaatgtggagtttacatgctgttccatggaaggaggaatttgcttggcccctcacccatctctctgatagcatggtattcatttggaccttcacagaagttatctgaaatttaagattttacatggctctgtgcagccagtggatactattgtgtgattattagtagccagagtcaaggcaggatttgatatttcaaagctcatggcttcctttcagagtccagcatgcttttgtggaagggatagtgtggctaaaaccaatagctcctattggattccccgggtagaatgggtctttatgtatgatctcattagaagaaaataagaccagggatactggacacctaggtcttctgcacagctgggtgttctggtggattctgctggcatgtaagtcctctgtgtgtctttgggaaagaggtcagcccgacatggtgtaggggtgctgcatacatgacaaggaaaagattcacacagaggtttgctaatcaaagcttcaaagatgcatatgcctgcaccagtccatggctgagaaggctggaagatccctgctttgggagccttctggactgtaagctcccacagatacctcgttctttagcataaggatcacctttccttcatgcttgatccccatgagcacctagtagcatgcctagcacacagtaggtattcaataaagactcactgtgagtgaactggaagctcaagaagaaagcttgtttatagctctgcccacagtcctgacatacttacttccttagatcttgtctaaggaactttgattttcctagcgctgagagagacagagacacacagaaagacagagaaaacaaacactacttctgccccatctgccctgcagtcataaatgacatgtgtgtgtgtgtgtgtgtgtgtgtgtgtgtctattacacttgtgtggaagacttcaaagggtcctttcaattatttccaacaaatacagcctgagatcatgtatgtaccaaaacgtgccaataccagtggtcactgaattagctacagactggaattaaaaactttcctatcatgttatagttgatgtacatgcctcaaagcatatataatctgtgtcctctaatcccacacaagtacttatcaaacatgataagacattattgccagaatgccaccacatcttgtcatttaatgtgctaatgaaatacccaaaagatcctaatttgtcatttttttcaaaatattttacaaacccatgtataatgtgtgaactgagaagcagctatgaagagggactacagctcagtggtggggtacctgcctagcacactcaactcaagtgctgagttaacaaaaagcaaacaaacaacaaaaacaaaacaaaacaaaactatacacattaatactaatgcatcatggttttggtctgtttttttttaattaggtattttcctcatttacatttccaatgctatcccaaaagtccctcatacccaccccccactcccctacccacccactccccctttttggccctggcgttcccctgtactggggcatataaagtttgcaagtccaatgggcctctctttccagtgatggcctactaggccatcttttgatacatatgcagctagagtcaagagctctggggtactagttagttcatattgttgttccacctatagggttgcagttccctttagttccttgggtgctttctctagctcctccattgggggccctgtgatccattcaatagagagtgtgagcatccacttctgtgttttctaggccctggcatagtctcacaagagacagctatatctgggtcctttcagcaaaatcttgctagtgtatgcaatggtgtcagcatttggaagctgatcatgggatggatccctggataatggcaatcactagatggtccatcctttcatcacagctccaaattttgtctctgtaactcattccatgggtgttttgttcccaattctaagaaggggcaaagtgtccatactttggtcttcgttcttcttgagtttcatgcatttagcaaattgtatcttatatcttgggtatactaagtttctgggctaatatccacttatcagtgagtacatattgtgtgagttcctttgtgattgggttacttcactcaagatgatgccctccaggtccatccatttgcctaggaatttcataaattcattgtttttaatagctgagtagtactccattgtgtaaatgtaccacattttctgtatccattcctctgttgaggggcatctgggttctttccagcttctggctattataaataaggctgctatgaacatagtggagcatgtgtccttcttactggttgggacatcttctggatatatgcccaggatggtctgtttttatagcagagttataagcaaggttttgtcccgaactttcagtttccccaaaagccttcatttaaacacctaccatgtgctaagcattgttccagatgctcatggggaccaagaagaaggaagggtggtccttacttgtaatgagctagggatccatgtggagcttacatcccagaaggcccccaacacaccgtgtgtgtgtgtgtgtgtgtgtgtgtgtgtgtgtgtgtgtgtgtgtgtgtgtgtgtgtgtatgttgaatgctgggaagataggcatgtgccgccatgccaagcaggttcatgtgatactggagattgaatcccagtgcttcatgcatgctatgcagacattccaacaactgggtattacgtttgtcagtgtgtgcatgcgtgtgtctctgcgtgtgaagaaatttcatagcactgtcctaagatgaggacccttgatctgcattcattcatcaaactaccacagcaaccacgaaaaggctattgggagagatttctagagaagtggaggtgagactgaagtttctgggtagctgcatgaggcagtctgggcttggtggttctgtctagtagggcaatagtgatttctgccccatagttgctgtgccctgcctcactcaggaggaacaagaggtagactctgcaggagacccccagctcacaggaagtgctcagtaaatgtggtagctaccagaatattgcctttaggctctgggaagacatctcttacccaggtcctcaaggccaatttgtttcacccaggttcatccggaagcagggcctggaccgcctcttcctggagtgtgatacacacatgtggcgcctgggggaccggcggatcccagagggcattgctgtggatggtggttctgattggttcctgctaaacaggaagtttgtagagtatgtggcattctccacagatgacctggtgaccaagatgaagcagttctactcttacacccttctccctgctgaggtgagttctaggaaagccccagggcaggagaggggagagaagctaggtgtagccctagcagagagtgaatgtttggcattcacctggctccaccaactgtcctctgaacctccagacagtgctgtcatccctgcagaccttgacctcatggtaagaactgtgatacacacatagtgtcaaggatgctatcctcatcctgcatggtctctgtgtgtgcaaagtacaaaaaaaaaaaaaaagaagaagaagaagaagaaagaatgaaagaaaaaagcagcccttgttcaagtcactcggtccctattcctaatagaaaaaaaaatccaatattctaattttctagaaaaagatgttactgctatttgcaacagaaaaagaaaaaaaaaaacgtgttagaattgcagaccctctgactgttgatggcactctctggaattgtgtggcgcatgcgaacagttgcaggacacagccacatcacatcttccagtcatcaatcatgcagtaaagtaataaccatttgcagcaccagtaatctcttttctcatttgaatacagttctgtccctcctgtcaatccctgatagtgctgtcttcattgtgcgtgtgcgtgcacacacacacacacacacacacacacacacacacacacacacactcctaatccaaaattgcccccagacagccaaatgagctctttccctggccctctccattgccagccatcatggctcagcccttcctgtggagcattttgaacaagcccccgagtcatctgtgacatcaaggtgcagcccccatttcatagggctccaggcttttctaaaacagcctggcacctcctggtttatgcaggccacatgctagacaccgccttctctcagatctaagctgagagcttccggcttcatcttcctgacccccagcccagttttatcctgacttctaacctcaggaaaaccacagtgtttgctctgcttccacagagcctgtggcattgctcatgtgtggttctctgcttcacccctgctgggccccaagctctgctcacacagctgggaacagaccatgcctctctgtggatggtttccatgcattatcaggccaggggtcagcttccgagagggctggctgtacatacacctcactgtgagaagcccagcctcccagagccagattttgctattccgcacgcacgttaagtcatcagcttttaatcctatttcagtgaaaatcaccttttctctccattctgataacctcctcatccattatcttgcagggaatttctgcctcgttataaaggacacagggcaattggtaattgggtactttcccccactgcttgatggaagagaggtgcctctgtgagcttgtagacaattcacgtttaaatccaggtcccctgccaatgtcattagcatcacaggaaggcaagtgagtggccttgagtggcaggtggtgcttcattctgcccatccacccatttagacgagagtctccaggagttcggtagttctcagcggtaagccagccacgccatgggtacccaaggctctgagtgcactcactgccccaacccctgcctcagcacctggtccctagggtctcagtcagaccctcttcctttgttgtgctgtgtccgccttcttgttctttcctagacaactccagggcttagaagaaatctaaaggctgagtccataaatctgccagtcaaacacatatccaccaacagcttcccctaggagaccagagcccagaagaaaatgtattctctggttggcagagattgttataaaatagtgttgaaacagaaatccctttcccttctctctcttagcatctcagaggctctatccaaacactgtctcctctctgtctctttttgtcccagcattacctttctatcagggtcgctggaagagttggccaagagtactacaattagaaaatgaccgtgggtcctggcttattcccacagaatgcatgcagcccaccttgtgttatatggactcctggttcagtaccatggataggaaacaacccttcagtatcctgtttaaccttgctgtgagctcagtgggtcctggataagcaccatggacagcaagcacacacctaactccagttctaaccacactaccctagtgctgtggctgctgtggctcctggtccccagcactgccaatggcagcatctctctcaccaccttttcttgtgttgtagtgaaagtgatgggccttggcttgtcacctttcccttccctcccctgcaccggagtttcactgtatggatgaacccatgatcctggccttcctcatccagaagtgaaatcccagctcattagacattgttacaagtctatttcaaacctgacctgttggttccagtctggctctttgcaaacaagatcctttgcatcccatgtttgaccctggtccctatttattgacacatcttcagaaactcttcctattggttaaatagacagcagatgcccagggtgataatgagcagatatcttcatattggatcctaggcactagtgaagcgatgtccaaggcaatggatttgtaggtaaaattagccagattaaacagacatctgtaccctgagtggactggcctggcagctgacaccgtgtgcctgctgagtgacttaatactggtatcctgggaagccctttgagatatgtggtcctcaggaaggacatgccaatccaacatacttggttgcattattgggttctcagtagccttttttttccccctgcagtcctttttccacacggttctagagaacagcccccactgtgacaccatggtggataacaacctgcgcatcaccaactggaaccgcaagctgggctgcaagtgccagtacaagcatatcgtggactggtgcggctgctctcccaatgacttcaagcctcaggacttccatcgcttccaggtgagcccacacaccccaccacagcttcccagaaggcctttaaggccagacctatgggccaactcctactcactgttcaatctagctataaccagagttagcaagcatgatgagtggctgaaccatcctcccaagattggctcattaaacaccccaatagtcctgccatatgtatgttgctgttattatgatccttccatcttaataataaagaaaccaaggtgcagaaggtttcaaacccttgttcatgatcacacacctccggctagagagatggctcagtgggcaagagtgtgagatgcaccacaagcatgggacctgactttggattcacagcacccatagtaggagccttggatggttatatgcctttaaccacagtgatgaggagtagagagacaggaagaggcatgaggtgtggtagccagcatgggagcagcaggaaatggtgaacttcaggttcagtaaaacacctgtctcaaggcaggaagccctagtgggggcaggaggggtaggagggggtnnnnnnnnnnnnnnnnnnnnnnnnnnnnnnnnnnnnnnnnnnnnnnnnnnnnnnnnnnnnnnnnnnnnnnnnnnnnnnnnnnnnnnnnnnnnnnnnnnnnnnnnnnnnnnnnnnnnnnnnnnnnnnnnnnnnnnnnnnnnnnnnnnnnnnnnnnnnnnnnnnnnnnnnnnnnnnnnnnnnnnnnnnnnnnnnnnnnnnnnnnnnnnnnnnnnnnnnnnnnnnnnnnnnnnnnnnnnnnnnnnnnnnnnnnnnnnnnnnnnnnnnnnnnnnnnnnnnnnnnnnnnnnnnnnnnnnnnnnnnnnnnnnnnnnnnnngggagggagagggagagggagagagagagagagagagagagagagagagagagagaggatgaataagactcatggctgttcacacattcactcaaagatgatataacttgaggcactcatttccgatggcattctcagcatctcctctacattttgggcatgtgcttgaacaccttgagggcagggttggtttgtttgtttgtttggttggttggttggttggtttgttttgtttaccccagcactcttgacattgtgactgggtcactgtgctggtggggactatcctctgtggtatctatctgtaagatggtggttgcacccatcaactgtcaaagttatctcacagcatcccaaaactgtgacctacgttcaaacttgccccttcttggaaaccactggtctccagcaaagtatagaatgttgttgtatttccaaagtataccttggaaaaacctgaggcatgttcagattgggagaacaccatgtactgcacacatgaaggaggactacaaggtggtgtctctgaatggcctttcactgtgttgttctgagcagtgtaggtagcaggtaggaaatgctcaacttcttgccacagccctgagagtgccttggccccaaggttctgcactagatagaatctcttctcattgtatatgctgccccaggacagtgtggtgccaggaaaggacagggctctgagggtcttcctcttttctagcagaattgaaacaaagccccataaaatgcttaaacagagcaggtaggggttactatagtcatcacatggaaatgacatcttgcttctcagaaagatgacaagagcagcaccacaagctgatgacatcacaagacatccttgctgtggtggcatagagccaaaattgcctttgtggagcttcaggtctcttaacctagtcccatggaacattgccacacacatgcagtatctccgttatcaggaggcttgtccaagaccccgagcctcagcctcctccacagctacaagtcagcatgaagcagggactgggtagaagttctccattctgtcccgttggatctcttctttaccagccatgggcctgagcctctatggtcattggctttgctgggttggacatcatctgttctgtaggtgggaaaactgagcccacaaagggattcaaatcactcttctatggccatgaagctaatgaatttggaaaggccaaagacagatgggtatgtaggagctttaccattagtctccactagttctgtgcttctctggacacacaacaagcagccatttttctgttgttatctatacttcccaatatccccacttagcatcttatctgcctatacttggtggttcactaagagcttccaggggaccctccaggcccatgttaacttaagcatagacttgggtggtttgggactctctactcatgcagaaagaatggctgcaaggggaaaatgcctcatctgtctaaaagaagaaaagtggcccatgtttctgtctagggagatccctgcccttgctgcagaccttcagcatttagagatggcagtccagagccttggtatgctgattcttacaggaagttgctcccttcagggtgttcctggatgtgtcatttgtatgccagccccaacatcctggggtcatcacggtctccaatgaagcaaagctaacttagagaatgaactaagtttacacgactttcttttgcagtaagtaaagatcaaggctatcattcaacatctaggctcaagaaactgatgaagcaaaaagaatagatgggttttttttttccccaaagaactctgagaatgagaatgataaaaatagatgcatacccttggggctagagagtacttcctgatcttctggggacccaagttcagttctcaacactgtgtcaaatggatgtaacttcagtcttaggggatacaataccctactctggcctctttggaaactcatatgcatgtgacattcacacacacatgcacacattcaaataaattcttcaaaacaaagtgcatgcttctagaagattattctgtgttcagagaatagcaggtagaggtagaagccatcttgccaatgaggcagattatctgaccctagaaaatgacaatagagaaccccatagccaaattaagtgacaatggtggattccttaactgcaactgagaatgcatgcaagaaactcatgcctgtacctatttcaaaggcaggggaactgaggctggagcagttggatgacatgcctaaagacacacacacctaggaagtagcagtggccacagactcaagtggcctgactccctattgctgtccaacccctcttcagacagacacagcagggctcgggaagtgaaagtgatggagtgttcttcatcttcaggatgtttctctctgaagagcttctgctcactcactaatctatcctagagggatgcggtgggaacagcttagggtttggagctgtgggacttggtgcaagtgttaggctgtgagcatttcctgagtgtcgattcccactgagagataaacatcctcgttggcagaaggggaatgacaacccttcctggcagagactggtgttgagactcatgatgtcctttgttattctctgtgctatcagtgtcagccctgcaactcttagtcctcagaagggtccaccatgtctgatacgcagcaatagttggccagagtgaactcctcaagggacagggctggctgggctttatctctttgtacagtgccagcctgtgggtcagcacaccacagctccctgaccagagtcagcccagcctactcttataaacgaagctgttggaatgcagcctccatagctcgtttacggttttgcctctggctgtacctttgcttcatagttgagaagttgcagggctttaactatttactctttggccctccactgaagatgtttgtgaagccatgccttagaaatagcgggggtgggtggatatgggggacttttggtatagcattggaaatgtaaatgagttaaatacctaattaaaaaaaaaaaaagaaatagcataatgcttacagatgccaggtgctttgtgttttgttttttagatctgtacattgtgtgcatgaatgtgcttgtgtgcacatgtgagtgtgtgtgtgtgtacatagagaccagcttcatcaattgtttctctggacagtctgctgtagagctcagacctttaggcaaaacagtctccatcttcgtgagatcagctgagcctacttgcaaacgtccatcatggtgtggcctgtggactgttgacagtactgcagaggtgggatcagcagcacaattggatctgagtatctagcctgctgtcctgtcctagttgctcatggctgcagggttctcaggaaggggacagagtatacaagctgggatgcttggcaggaagaggcttcatctgtacagctatggagccctcagctctgcttggtgcagaccttctaggtgctccctggtcctccacgctcctgccctgaacccttccccatgctctgtatgtaagcctaggaaactcagtggttcccaagacgagcactgctttaactgaactttggtttgacattgaggtcttttgaagaaggagtagataagtctccctagaggcagtattttaacaacactctccatgaaacagggtctctcagtaaacccagaattcccagatttcactaggctggctggccagcaagtcccaaggatctacctgtctctatctctcagccctgggagtacagcacacatcacttgcccagcgtttttgcactccaactcagatgctcatgcttgcagagcaaacacctccctagctgagctgtctccccctagtcaaggcatatcgtatctttgactttcaaccctaagtcttcaccctggattggccactgatttgctttctatctgagggcaaacccttctccctcttggacccatttccacgagttctcatttcacacggcaaacaaaatcagccaggagcttcatttaggacttacatctctgaatgtcatccccagggttgttgactgagtagagaaaaggtgagagctgtgggtttgcatgttagaagtcttgctcagagcatggtccagccagtcactaccctgggataggttgtatggagtctcattggcactaaggaaacagctgctggttgaacaggacttttttatttctattgtaaaatggttatctagcagatctgtcttcctgattccagatgaactaagacaaaggataatcttaggataaaagagaggaagggtcatagacaaggtggagtctcatatgtgagcgactgggtttttctttggagccacttgacaaactgtgtagactgccatgctcccagcacctggagagtatgaagtgtcgccccctggagtgtcccctgtgagcccacaaatcagctaagatgctaggggacactagggcaatggcaggaagaagagcctgtgtttttgtccaaagggatgggctgccattccattttacctactatggccacctcagaatgtgacccgtgttttcccacaacagccactattgaaaaggaagccacatttgtttccatgaatcttgcgctttgtaaacattgccagtgaatttgattttaaagcattcttccagccaaagaaaatacattcgccctgggatgtttatctgtgacctttgccaaaaagctgggagccaacgctagcactgaacacccacggttcaatttatttcagggtcatttgagtgctgtgtcctaaatgcccaccatgctttgatgccttacagataccaacatcatccactctcagtatgacccattttgtagaggataaagttgaaaacaggtcatggagtcccagggctggagtttgaagctggcaggtttattgcagtgccttgcctctccttgcaggatgtaggatgaagacagcccccatttcttgataataaaacttagggtttttttctctcctgagcacagcagacagcccggcccaccttctttgcccgaaagttcgaagccatagtgaaccaggagatcattgggcagctggactcttacctgtacgggaactatcctgcgggcaccccgggcctccgctcctactgggagaatgtctacgatgaaccagatggcatccacaccctcagcgatgtagccctcaccctgtaccattccttcatccgtctgggtcttcgaagagctgagtcatccctacacacggatggggagaacagctgcaggtgagccaggtgctgggctgggtctcaggcagaacaagatgctaacatcatgctctcctctccccgctcctccttatcaccacgtgactctctctatgctatgcctcttatctttatcctccaaacgcaggctgtaatattgaccctaatcatagtcattgtttatgctacttaaatgttctcccccttccttccttccttccttccttccttccttccttccttccttccttccttccttccttccttcctttctttctttctttctttctttctttctttctttctttcccattggcctgtcttcctttcttttcttcttttgcaaacagtatcatactttgtcgcccagactgaccttaagctcatggtaatcctccagcctcagttcccacatgccaagatcacagatagacaccattatatctgactttgagcaaagccagattgtccaaccctcagtttcttcatatataagatgaaaaggaagtgctcacagccacctctggagtgtatattatcatcctcacttgaatagtacttaacatgctgagtggtcagtagcttgcacatgattctggtaccctagcagccctggataaggtatcacaatggttagccgtgagtgttctggttgggatagtatctggttagctgcccctctcactgctgtctcattgtggctctttatttactgtcccatcactgcagagtctagctttcccagtcattagggccatcaggtcccacactgtaagaagcttgtgtgtgtgttacagtgtatgcatgtgtgtacattcatgtaactgtgggggccacagaccaacagcacatgccctcctccaacacccatcacctcactttctttcacattttttttaaagtgtgtgagagagtatggatagccatggaggccagaagaaggcgtcaggcgtcctggagtttagctagagttattagacaggtctgagctacccattctgtgtgctgagaactgagctagcaccatctacaagagcatcctgtgagcccttactgctgagccgcctttgcagttctctctctctctctctctctctctctctctctgtgtgtgtgtgtgtgtgtgtgtgtgtgtgtgtgtgtgtgcatgcatgagatttaggaagagtctctcactgaacttgtcgctcactgattcagcaaaactggccagcaaccccaggctcctcctccctctaccgcccccagtgctggcactacaggcacatgccacagtttttgctctttatgtggctactcgggatctgaactcagatcttcacacttacatagcaagcacttttaccaaatgagcttttacccaacccctctctggggtcagagagtccagacacccccacctctctcccaagcctaagggacatcacctccaacaggcccatcacatgtggttgtaccacctagtatcaatgtcagtgaatatctttccccctgtccagtctgtgggaagagtatcaatcttgaaaccactgatgcagagcacagtgtcccaaacttggccagcaactgtccttccagcttaatcacgagcctcctaaaacctataagataaatgatcttataggaaattccaagagacactcccgatttatttagggttgttgaaacttcctcctggtacttgctttgaaacgaagcaagccatctagttgcctcaggcccagaatcctttggcttttctccttcattttttattgtgatggagctattgtgccttgccatgggcaaacccatgtatttatgaatcggagactgggaataaatcaggacaaaggacccttatcccgaaaaggccgaggagaatgaattgctacccgtggggcatctagggaaatagcaagtgcctttcaccggatctgggcagttcatgcactctgtgtagttctaggctgtggtgcaacctttcgtaaaacagtgcttattgattcagtttctcattataaagtaatgcatgttcttttgcagaaatgtgtgatatagcagattcaaacataggagaacaagaaaatagaagctacttctgatccaccatgtagggattgagatgccaataatgttactacaaaaccttaactcaggctccagcaaatactactacttgtgagttggtgtgagtcccacagggggcgttgttcacactaacagagactgcctgaggtccatgcacctgcaagtcaggatgagccctgcatgaggcaggcactgtgcattccagcctagaccacttgtggttccaggctcaactcttgcccaatgtggttaagatgtcaacttgaggttgactatcaaatcatctgcttttccaaggcaactagaaacccaaaactgtatgttgctctattttcccaaagctcactttatttaaataagggatgggagaaacataccttgggcattcccagtgaattctttaaattattgcactgcctcttggccatctcccttttcttggtgaagttgctgttgtcattacttagagatggaataatatgactgtaaggtgcagagggccttgtgttacaccttgggttacatggttctcagatgtactttaaaagcacaaagctagagcttatcactcatccgcaatcactgcttgaatacctactgtgtaccagactctttgttaggcacggaacattcacctctgacccagacagacctgaccccaaggtccttacctgcagattctagtgtgaagacacacagttcctaagtgtgtgcatgtgcatgcttgtgcgcgcatacacgcacacaaatacacaagagaaagggggtaaagggagggagagagaggaaaaatattgatagatgttttgctgagttgtgagatagttctcattaagtgtaaaggcaagacatagctcaccatatactcactagaaaagaggaacatccccagcagagagaatgtcctgtgcaaaggccctgaggcacatctgaactcagcacactcaggagcccaaaataaggtaccagtggccaacaagtggtaggtttgggcttaggggaacaaatcaagctgagaaggacagcttttcaatccaggtaagaggtttgagtttagcagcaagtattaagagcctgtggctcgtaaggaggcaacaaggttgactacagtgaagagattcctgtagagcctccatggaggcttgggaagcctctggcagtgctcagcagagcagaagaaggtggagccatacaacagaagctttgatggagatggctcagtggggaaatctcttgtctcacaaacgtgaaggctgagtttggatccccagcctgcactgtaacacctgcttataatcctagcagtggtgagagggagtaggagagatggatcctggaggctcataagtcagctagcctagcctaactggcaaagttccaggccaaaaagagacctcatctcaaataaaaagcagaaggtgcctgccttagttagagtttgattgctgtgaagagacagtatgatcaaggcaacctcttataaagaaagtatttcattggggctggcttatagtttcagaggtccagtccattatcatcatggtgagaagcatggaaacaggcaggcagacatgatgctggaggaaaagttctccatcttgatcctcaggtagcagaaaggaactgtgttacactgaccagacttgagcatgtatatgagaccgcatagccccgcctccacagtgacacacttcctctaacaaggccacacctcctccaataaggccataccatctaacagtgccacttccatgggtcaagcatattcaaaccaccacagtacccaagagtgacctccacgggcacactctgcacacactccccaacaccctccacatatacacagtcatctgaaaacatgcagagaaacgcacaagcacacacccagaagaaagcaaggaaaggtaagtaataaactacagattgctccaatagcaatcctttactggcccatgttcttgacatgcagcaacactcagtatggttgacatactttctcctgtgcctctcagagagcacacactcctctgtcacacccaccttacaaaacaaacactataggtgtattacatgtggactgctgtaatgatacctcataacaaataaacccaggtgggggatttataatctttccttagtgtgggtgtgtgaatcagctaggccacctcccttcctagtctggacctgcctctttcctgtgtcttcagccagctgcaggtcagcatgccagaactacagttctcagctgggaactctcggctgaaccacgatagtgtgggctaggacaactttgatgacgctcatctgttacgctcatcatcttcccgcaggctagcccaaacattctttcatggtgacccaaacaaggctggattagaactggctgcaatggcacctctctactcgctattggccaggaggcagaaaatagactctttctcaacagtgcaaagagatactgaaaacatggggctttggggacacccatgcaggtgaacacagacttccatagctatatcaaggggtccaagtgtcacaaatgaccattttcatttaaatgaactaaaattaagccaagcatggtggcacacacctataatactagcatgtggaagtggagaccaaaaaaaaaagtcaggatttcaaggccatgttcaactatggattaagtcggttgccctcctgggatgcatgagtctctgtctgaaaagaaaaaagaaggggggggggaggaggaggaggaagagaaggaggaagaggaggagaagcagctaagaaactggtttagtgggtaaaatgcttgctactcaagcatgaaaaccagagttcaaattcccagcaaccacaaaaaagccaagtgaggcagcatgcattgttagtcatagcactgggaggcagatggaagtaccaggcttcactggccagccaatctatctaattggcgagctctgggtttagtgagagacactgtctcaaaaagtaagttgagaagttatagagaaagataccttccatcacctttggcctatacacacacacacacacacacataaatatattcacacatgcacacacatatgtgtatcacacatacacaagtaaaatttaaaaacgagtgatctagcattaaaaatgatgcccacatttcaagggctcagcagttgctggtggctaccacgttggtcagcacaggtacccaatccttccatcacctaaaaaagcactgccagacagccaagcaactgcaacagcacagcgccctaggcttcccacccaccatagtcacaccaaaagtgtgccagcgtgggcagggaagacccagccatctgaagtcaatgcaggctctttctgcagagccccagaggcatcccggtaacaaggcagtgatttcgagaggctcgtcaacacgggaaggaggtctccccagccattctaattggacataaagacttaaaactccagatcggaagcagagggaagcctgcagttagcagagaggggacagtgatttgtggaacgctgttattagggagccgctgcagcctcttagtgccgtgcaatttacacactgcagaagcaacagctttttattttgcaagtggagagtttctggtctctgtggctccctcttcccttctgtcctctgctccccacttcctcctctcctgtgctgttttcgggccctacctagccagccaacctgtgcggaccagaggcatacaacgtaaaacaagctttgcatgggaggctgggtgtttgcacgtgtgtgttggcagtaatttttagaaaaagaaaaaacaatgtgggttcatcgacacccacctgaggaagagaacagcaagaagataaatcagtactcctgataaacttaggtaccagatttaaagagttttttaggtgtacgtgtgtgggtgtgaatgaacatgaattccaaaagaatgaaagatatgttacaatattattacccatcaatagatcactggttctataaaatagaatgacacactctcatctgcacagacacacacaatttcttattttcagagacatgtgagagtgtgcaggaagtccaatggagcaagagcctggcatatagactacgattccagctacgcaatgtacatggggctgtggagacggttctatcagtaacgtacctgccacgtgagcatgagaacatgtaccctagaacccacatttaaaaagcaaggcatggtggcaggtgctttgttatcccagcactagggaggtagaaagaggcaggctcctcgggctcgctggtcagctagtctagcccactggacaaactgcaggtgagtgatagaacctgcctctaaaaacaaggtggaagacacctaaggaatgacatctgtggttccagttatcctccatacccatgcacatgaacctacacacacagtgttagccagcccactaggtaacatgcatgcaattatgggcatagaaaatgaagctacaggaaaaggcaccagacatcgtctcactctctggtacccagcaccagaggactccgtagctatctgtgaattggtgttatcatctatggggagaggcatcgaaagcagagctttcttttctttattgtactttcctatagtcaccatgttttatacttatcactcttgttttaaaaaagtaacaatttgcagccgttaagaccctaggttcatggatagcagctttcagactgatgcagattatgacaggctaaatgggggctgctctagaccactgtggattgtggagcctcacagtaacactacacatctcacagcctggtcccctgttctcaggtactacccaatgggccacccagcttctgtccatctctacttccttgctgaccgattccagggctttctgatcaagcatcacgtgaccaaccttgctgtgagcaaactggagacactggagacatggatgatgccaaagaaagtcttcaaggtcgcaagtccccccagtgactttggaaggcttcagttttctgaggtaagaggccaagcagtgtctgtcataattgtctcttgcagctagctctcttgccaggctccgtgcttcacctgacacttagggctggaaatggaggaggaggatatctgcagagccttaaagatgagcatagtctgttcctggagacagttttccggccccataaactgtaaccagcatcatgaacaacccaaacagagatgtaatgaagtgtcaacatctttgaacagaatcagcttagaagcatggtctattgtttttgggtaaaatttcttctcttaattttgcttctcaaccattgatttcttctaagcctgttatagtaatgaaccaggaacaagatagcttcttcataaagtcagggcattagtgccattttatggattgggtaagtgggacttacggacgtccaattattttctaagtaactgctaagacattaaaaaccaaaccaaaccaaaaaaaaaaaaaaaaaaaaacccacagaattgattccacgtctcactggccacaaataccatgccttgttttgtgctgttattttccccttgttcctaacacagggactagctcctatcctttaggagtaggtgggctggtggccatgtaaatgaatgaatagaaagatgggatgatggagctgattgttaattagatgaactgttgaaccaatggatggaggcatgggagtagaggtgggtgtgttaatggacatatggactcatggatgacagatgggcagacagattaaggatagaaatgtaggcagtaggatggataatgatggagatgagtagatggatggacatacagatgcatagatggaccaatggatgacaaatggatagacatgtaaatggatatacgtgtaagcaacaagatggattgatgatggatggattgatgacagatggatggaaggatggatggatggatggatggatggatggatggatggatggatggatatgacatatagaataataggtagatgtatgaaaagatatacagaagtttggttggataatggatgggtggatagctagatgggtagataagtagacagaagtgtgcagaaatggatgagtgggctagcatgggatgtatggattcatagaatgttgttccctctattcacaataacatcagctttctttgtctacaatgtccagaagagcccacatgacctggttgctgtttgcctttctagccttgtccaataccgtgctatttcttgctcacagttcctgtatctttgtcaaacaagatgtccttgttcttgactgaagtttgtcatgtccctatacctagagtgctttttcacaggttgttctatattttgaaatcttttgttttttagtcattctgatctaaatccaagagccacttttaaagacactttccctggctacccccctcctctgccctgtgtctcagtagcaacattatatacctgctacttccttaattgtctcttttagaatttaccttataatgttatcttgatgatttatgaacatgtctggcttatatactggacccctactatcactcactgctgcatcctctgcacactgtcattagtaaaagagccatgccattagtggatggtgaattctgttgaataaatatgactgcccctggggctgggaaatgctggaaggaagaggaggtgtgattgagcttgggcattgtgacaaataagttggagtgccaggtcaaggatgaagagtgacttgatatgcaggaacctgagggtctaggagtctgaagagaggaactgcacctgcccacacgtccttgctggtccttctccactccctgtaggcctgtctttctgttctgccccatgactgaatagatttcccctgtcaaacaaacatgggtgagagtcttgtaaactcgtgtttttaaaaaaaggttccatggggattgactgcctctgagctgctatggcagccagctccataaattacaagagtcagcagggcaattagatgctgctccagttggattctgttctaggggcccaagcagcccattgaagacattaatgtcccattaaagagatgaatgccttgtgtctggcctttccctgtttatcagcctgctggtaggtcactgggtacctctggcagtgacaagagatgttggccacagcatggttagtaatttgtgagtattttcactatgggtcctgcagtccttgtgaccaagatctccatcagcaatgcagattcaggaagcagaggccttaaccttgtcacagaacttttctagacatgcttagttaataacaaaggtgaagaggaagaggaaagacttacagggccacttacaaactgttaaggatacacttgatattagcatggtctcagaatcttacatagtaatggatggtcaatttagatttctctagcatgatagatagcccatgacattgattggagaaagggatgctcaccaaggacccacaatatgctagattcatgagagacagtagtgaaccagacaaggtatacttgaacttgaacttaggataggactaaattctgatgggacaggcagacaagtaatgagtgaagaaaactagttcagctaatgacaaatactgcagaaaagatgaaattcattcctgtgcttgcttaggctggtgatcagatggtcccttcttgttgttgtcgttgttgttgttgttgttgttgttgttgttgttgttcttcttcttcttcttcttcttcttcttcttcttcttcttcttctccatcttcttcttcttcttcttcttcttcttcttcttcttcttcttcttcttcttcttcttcttcttcttcttcttcttcttcttcttcttctcctcctccccctcttcttcttcttaaagacttcttaaaagagctcaggttcaagctgaaacttgttttaaaaaaaaaggaccatatcacccatgggatctagaacattctgagtggaagacagagcattgacaaatgccatgagattcttggaaggagcttggcatgctaaaggagaagcaaggccattttgactggacatggtgaatgagatgatgaccaaggccagtgtgaaggtcacgataaataagctggagactagaggagatcatggttgaaggtgacagggttagggcctgggaaacagtatggtatgcttgaacttgaacatttatttaagtttctgcaatagcccattgtgcaataaatgattgcaggctcccacactaaggccaagtgaaagataacagacatgacagatgtgacagtaaggagactctatgtgagggtgatctcctctccccatgctttgggtagggaccaggagacactcttcatgcccctcagtttaagagaagaccctagtttttacaagataatttacactctccagctcaagtcactttgtttaagaatacaatttcaacgtaactgcccacctccattcctttaggaaacacaagaacaatgctctggagagttccctgatcagttatgaattcattctgtaagacctcagcgtggctttgtaaccattcttcctttctgttagtaatgttacaagggcaggtgtccagagtgtggatatcctgagaaacccttctgctcaaccctgatcattaaatatgtgttcaacttcgagctagctagctaggtagacggatggatggatagatacacagacaaacagaatgaccaatgaatgatagagtagtacacagatacttagacataatggaaggggtggatggatggatggatgatggatggatggattttctggttgatgatacacagataatatatacatgagagattgtttcatgagaaatagatactgtgaaataaataatttataggtagtgcatattgacaggagatgataaatagatggatggacggacagacagacagacagacagacagacagacagacagacaatatttgactgctattaatagagttcctggactcccacagctagttactgactctgagcatcagtttcatctgcacagtgaggagagtggcaaagttctccccttcccagatgagaatatcacatgagcaggcaggtacagcagatgcttcacctcatgcctggctcttcagtgttgactgtggaactgtgtgtccaaggtgaagcatctgcatggtaattccaaacaaatccttggagaaagaaaatcagctaccatttgctgtgcatatacagagacttctcaagagttgtgcagccacactatcacctcaacctgcatgcacactctcacacacagcaccagctttctgttgtgttcagtatctgcctcttccccagcatgcttatgtgcatgacttcagtaagtcacccctcttggagagcatccaccccctcttctttttactaagaagactcccctcatctcagcacagctgggtaccaaggttctatttggctaattcactttttgtcaagcaattcacttacttattgagaaaacattgcctgaacacctactatgtgttcatttctcttgtaggaaccatgaaagagttgtgattaacacatagcaggctcttctcacagggcctacattatggtgatgggaagggaaatattgaggtttcagatagccctaaggagacctttcagataagagctggctatgcaaaagtatgagaaggtaggacattccaggcagggagcatggttcaggacagggagggtgtggcttggtaagttagaatggctgaaggaaggagcatacagaatgggataggtaggtggtggtggagtgaggaaaagcctgaggaccatagtgaggggttggcttagacccagggacagtaagaagccctgagcagtgaggcacaatgtgaccactccagattcccaaatgcatagtagcttaaaggtgacaaagtggaaggaggaaagccaagggatttgccacccagctacccagctggtgtgaggaatagaggatgtgggatgtgccgcatcactgcagtccagagcagaatgctttgaagaagacaaagttggatccctatgctgcagtggtacgggttgctgggctctgtttccaagcttccgataggttgctccaaagccagggctccatccttattcagaaggaacacactaaatttagagtgctatttgtaaaactagagacccaagaaaaacccagtctcactgagcgttgcttggaatggcgtacagggtgatgtccattcacacttgcattcaatgcaagagtttgggggttttgagtcaaagcacacagcatggctttggcacagggggatgctggtttagtggaaacttttgagtgggagtcgcaatctggtcaagagttccatgtcttctgtttaccatctgtgtaacgtgagtcctaggtgacttggagcctcagcctcctcatgggagaaatgggtatgcacaaccacccaagcaagatcctagactttcctaagactctgttctgaagatttattctcttgtttcaggttggcactgactgggatgccaaggagaggctgttccggaactttggtggtcttttggggcccatggatgagccggtggggatgcagaaatggggaaaggggcccaatgtgaccgtgactgttatttgggtggatcctgtcaacgtcattgcagccacctatgatatcctgattgagtccactgcggaattcacacactacaagccccctttgaatctgcctctgaggcctggggtctggacagtgaagattctccatcactgggtgccagtggcagagaccaaattccttgtggcacctttgaccttttccaacaagcagcccatcaaaccaggtgagtgctctcagggtccctgaggaggagagggtccatcccatggagccctgggaccccatgcccaacatgacacatgaggctgccttgcagagagcaaagcttccccaattgggttttttccctacttgtttaccctatagagctggctcatttcctccttgtacacagaggcagtgccatctgtgtgggtgtttatcagctgctggcccactggactgccacaaggctctgttcatatttaagacaagctgggtactaatcctagacacacactgagttttaacatggcttcttggctgtttggaaaatgataattactgatgcaattctgctcatagaatatgtgataccctaagtaaaaaggacaaaccgtacactggtggaagatgtttgctccccaaaatatactaaaaaataatcccataaataagagtttggcaaactatgagccccagttaactatgggcatttctggtctttatttttaaaaaaaatcttacagggaacatggccatgggcacttgtggacacagtacctatgtctgctttgggctttagtggcagactccaacagtcaggacagagactgactcagaaatgctgtctcagaaatcaaaaccatttagcccctgaagacgatgagtgccattggcagctataacagagagagaaataaggaagaaaaaatgagaacaaaataaagaggaaaaaatgaatttcccacatatgtataatttaaagcaaaagtaacaacaaaaaacctcaccctcattaataatgagaggcaataatgaaaattacaagcaaaaagaggttccagaatgggaaataaatgtgtgcctgtgatggtcagtcagtgccacagggcaggtcagagatgcatggacatctatccaaggctcctgagggctcagtatataggctgcgtttgtgggacaggtgacgcccttctcctcatagtgcatacacacacctaccacagaaatcccacattcaggagtaggcctgtggaagagacagaggcaggaattgtagcagaattgttcatagcacacaaaaccacaaacaagctacaagttgcccactcaaaagcacagtgtgtggtcggtgtgcacagtcgcgtcctgtgtcctagagacagcaatcaagatcagtgccatgcaactggaaaacacgctggatgaggaaaactgatcacagaataagccatgcttaggattacttcatttaaggttcaaaaccaggaaaaagtcaacaatatcttaactatttcgggatccacatgggagcaggaagctaagagaacgaaggaggctgctggcctttgcttcctgtgagcacagagtccagagagacagagaccgagcccctaatggctaccttgtttttattccagatttacacttgggtttctattttttcatagacttccatttgtcaataacatctcttttggctaaattcttgcccttcggggcttaccacttcggccagcctgcctgagcacttctttctaacacctttgacggtgttaaaccataagcacaagcctgtgtcctaagcacagagccagactttggatgctgtggtacattctgtaccaagcaggcttttgtagccttctaagtcggtgcatggaagctgccagctagagaaattccaccattcaaaccacaggctgttcctttctggacacagtaccttctgttgtttgatgatggctttgtggcagaaagtgctaaaaggaagattctggaaaataaaactgtatgttcccactcccagacagactcatagaaacaggattcctgagtttcctagtacaaccaccccttggtgcctatggagaattggttccagggtctttcttgattataaaaactgcaggtgtattagttccttaagagcatggcatttgcatatgccattctccctttcactgtaaatcatttctaaatggctcatgatgcctaatacaatatgaatgcatacacacagctgtggtacgttgcttaagagatgatgacgataaaagctacgtagacctgaccagcatgcacagttttccccaggaactgccctgagttacagagagtatctggactgtccgtctgcatgttacacaacacaagcccaggagctagatacacatgacagtcctgctaagtgggaagcattcccacttggcagataccaagtgccatactgataacacatcccaggaagacacagatgtgggatgggtgcctacagtcctggaaaaaaaggtcttggcttgaatcctggcagcttctgctgagtctttgtgctgaacaagcaaatacctagacacctggtgtcttcttaaagtctgggcctctgctccagaattagccaagacacagcccacctacttagtatcttcaagtgtcccttcacgagcatcttttcacatccttaaagacctaaaaggcaagtgtgaagaagagggactggagccacacatcctccctgtgtcaggtacagctctgggacaggacaaaggatgctctaaatccacccaccccacaaaaggagtgcaggatcctgctggtggtcgtgatctctccaatattttctcctgtgatttccaagaaggtgggagctgctcccagcatccccagaaagaccttgggtcagaagtactctagggaagcaggtcccctgttggcagtaattgtatttgttaatgagacaaggaacactgaggtgggagtaatgcaatttgtgaaatgattcatcttgagtaatttactattgatgcgtccctggtaatctaagaagtctgatgaggtggaattgaggaaaatttaattatggaggcaagcatccgagctgatgccgtggtgctgtttcccacattaacctcttttctcataaagtgctatggcttttttttttttctgtatcagccacagtattttgctcccaatatttcaatgtctgttagctgttcctcttgctttgaattgccccaccgtttgtcagcctgggaatctctcaatcacctcctcctacctctgcagggtagaagcacaaagagactcatagagcaattaggacatgcagcaaagacagaaggcccttttctcctgcacatagtgttggtgctaccaaccctgccttccagtatcgtgcctatggtcaaaacctgacttgttgaaatttcatttgaccaagaatcagatccttttcaaataggatacaccttgcttgtctcctacacccccaaatgcttacaatatgcacgttcctccctttagccccaaggaaactcaaccgtcctcttgtgtgtcccttgatttgatttcaaactatgtgaacttgtagccagcctcctgtagatctaactaactggagccaggttgagtgcctacatttgccatatggggacaacaaggtttcagaatgctggtaccaagatggaaagatagcaactccactttagctgtgagctgattattgaatctgcatagagcatcatggtggacagcatggctttggagtcacttgggatcgaactgactatagcatctgtttcctcacctagaaaatgaacaggagaaaaaccaacccaataggcgtgtttggttggtttgttgtagtggagaacttagcttcagcaccataggcagagcattaggagtcactgcatcaacctcagagttacacagggggcacagcatggcgggtgaggactcactggtaagatgagaggggccatcagagaaaactggggcacaagtcagaagtcacacaccacgtatgtgggacttgggtactgagaccagttggcccaactagctcccacaggcagaaaggctggcgaccaggacatgatcaagcagacagagccgttaggagggtggcccaacccactctggcccatagcaggcttccagggaccactttgtagtgctgagttcacatgctatgcttgggaccaggctgccaggaagcaagaacctgcagcttctcaaggtcacagcagtcccttggcagcccagaactgagccactctgcaggctctgtggccttggattcatgttctggctccaacgtccctacttgtgtgatttggcaatgaggcttcacatttctgttccctctacctgggattctcctctctggccttatacacgtcaatcaacacttcattccaatgatgcctcctcaggaaagtcttccctgcccaccccagactgctctccacgccagagcagagcaaacacttcccataaatgataagtagtgaatattttcagcttttttttttttttttttttttttttggggatacacttagccaatttgaatattttgtgacttatatacttttgttcacagatatttacatctatcggtgacttctgtacaacattatggctactgtggtatttgccaaatgagaactttatggttttcccatcacttttgcatttgctaactgaaattctaacaaaattggaactattgttctttctttattaatttatggcagtataaacttaaaagtattttttattttcttttttttttttttccattttttattaggtatttnnnnnnnnnnnnnnnnnnnnnnnnnnnnnnnnnnnnnnnnnnnnnnnnnnnnnnnnnnnnnnnnnnnnnnnnnnnnnnnnnnnnnnnnnnnnnnnnnnnnnnnnnnnnnnnnnnnnnnnnnnnnnnnnnnnnnnnnnnnnnnnnnnnnnnnnnnnnnnnnnnnnnnnnnnnnnnnnnnnnnnnnnnnnnnnnnnnnnnnnnnnnnnnnnnnnnnnnnnnnnnnnnnnnnnnnnnnnnnnnnnnnnnnnnnnnnnnnnnnnnnnnnnnnnnnnnnnnnnnnnnnnnnnnnnnnnnnnnnnnnnnnnnnnnnnnnnnnnnnnnnnnnnnnnnnnnnnnnnnnnnnnnnnnnnnnnnnnnnnnnnnnnnnnnnnnnnnnnnnnnnnnnnnnnnnnnnnnnnnnnnnnnnnnnnnnnnnnnnnnnnnnnnnnnnnnnnnnnnnnnnnnnnnnnnnnnnnnnnnnnnnnnnnnnnnnnnnnnnnnnnnnnnnnnnnnnnnnnnnnnnnnnnnnnnnnnnnnnnnnnnnnnnnnnnnnnnnnnnnnnnnnnnnnnnnnnnnnnnnnnnnnnnnnnnnnnnnnnnnnnnnnnnnnnnnnnnnnnnnnnnnnnnnnnnnnnnnnnnnnnnnnnnnnnnnnnnnnnnnnnnnnnnnnnnnnnnnnnnnnnnnnnnnnnnnnnnnnnnnnnnnnnnnnnnnnnnnnnnnnnnnnnnnnnnnnnnnnnnnnnnnnnnnnnnnnnnnnnnnnnnnnnnnnnnnnnnnnnnnnnnnnnnnnnnnnnnnnnnnnnnnnnnnnnnnnnnnnnnnnnnnnnnnnnnnnnnnnnnnnnnnnnnnnnnnnnnnnnnnnnnnnnnnnnnnnnnnnnnnnnnnnnnnnnnnnnnnnnnnnnnnnnnnnnnnnnnnnnnnnnnnnnnnnnnnnnnnnnnnnnnnnnnnnnnnnnnnnnnnnnnnnnnnnnnnnnnnnnnnnnnnnnnnnnnnnnnnnnnnnnnnnnnnnnnnnnnnnnnnnnnnnnnnnnnnnnnnnnnnnnnnnnnnnnnnnnnnnnnnnnnnnnnnnnnnnnnnnnnnnnnnnnnnnnnnnnnnnnnnnnnnnnnnnnnnnnnnnnnnnnnnnnnnnnnnnnnnnnnnnnnnnnnnnnnnnnnnnnnnnnnnnnnnnnnnnnnnnnnnnnnnnnnnnnnnnnnnnnnnnnnnnnnnnnnnnnnnnnnnnnnnnnnnnnnnnnnnnnnnnnnnnnnnnnnnnnnnnnnnnnnnnnnnnnnnnnnnnnnnnnnnnnnnnnnnnnnnnnnnnnnnnnnnnnnnnnnnnnnnnnnnnnnnnnnnnnnnnnnnnnnnnnnnnnnnnnnnnnnnnnnnnnnnnnnnnnnnnnnnnnnnnnnnnnnnnnnnnnnnnnnnnnnnnnnnnnnnnnnnnnnnnnnnnnnnnnnnnnnnnnnnnnnnnnnnnnnnnnnnnnnnnnnnnnnnnnnnnnnnnnnnnnnnnnnnnnnnnnnnnnnnnnnnnnnnnnnnnnnnnnnnnnnnnnnnnnnnnnnnnnnnnnnnnnnnnnnnnnnnnnnnnnnnnnnnnnnnnnnnnnnnnnnnnnnnnnnnnnnnnnnnnnnnnnnnnnnnnnnnnnnnnnnnnnnnnnnnnnnnnnnnnnnnnnnnnnnnnnnnnnnnnnnnnnnnnnnnnnnnnnnnnnnnnnnnnnnnnnnnnnnnnnnnnnnnnnnnnnnnnnnnnnnnnnnnnnnnnnnnnnnnnnnnnnnnnnnnnnnnnnnnnnnnnnnnnnnnnnnnnnnnnnnnnnnnnnnnnnnnnnnnnnnnnnnnnnnnnnnnnnnnnnnnnnnnnnnnnnnnnnnnnnnnnnnnnnnnnnnnnnnnnnnnnnnnnnnnnnnnnnnnnnnnnnnnnnnnnnnnnnnnnnnnnnnnnnnnnnnnnnnnnnnnnnnnnnnnnnnnnnnnnnnnnnnnnnnnnnnnnnnnnnnnnnnnnnnnnnnnnnnnnnnnnnnnnnnnnnnnnnnnnnnnnnnnnnnnnnnnnnnnnnnnnnnnnnnnnnnnnnnnnnnnnnnnnnnnnnnnnnnnnnnnnnnnnnnnnnnnnnnnnnnnnnnnnnnnnnnnnnnnnnnnnnnnnnnnnnnnnnnnnnnnnnnnnnnnnnnnnnnnnnnnnnnnnnnnnnnnnnnnnnnnnnnnnnnnnnnnnnnnnnnnnnnnnnnnnnnnnnnnnnnnnnnnnnnnnnnnnnnnnnnnnnnnnnnnnnnnnnnnnnnnnnnnnnnnnnnnnnnnnnnnnnnnnnnnnnnnnnnnnnnnnnnnnnnnnnnnnnnnnnnnnnnnnnnnnnnnnnnnnnnnnnnnnnnnnnnnnnnnnnnnnnnnnnnnnnnnnnnnnnnnnnnnnnnnnnnnnnnnnnnnnnnnnnnnnnnnnnnnnnnnnnnnnnnnnnnnnnnnnnnnnnnnnnnnnnnnnnnnnnnnnnnnnnnnnnnnnnnnnnnnnnnnnnnnnnnnnnnnnnnnnnnnnnnnnnnnnnnnnnnnnnnnnnnnnnnnnnnnnnnnnnnnnnnnnnnnnnnnnnnnnnnnnnnnnnnnnnnnnnnnnnnnnnnnnnnnnnnnnnnnnnnnnnnnnnnnnnnnnnnnnnnnnnnnnnnnnnnnnnnnnnnnnnnnnnnnnnnnnnnnnnnnnnnnnnnnnnnnnnnnnnnnnnnnnnnnnnnnnnnnnnnnnnnnnnnnnnnnnnnnnnnnnnnnnnnnnnnnnnnnnnnnnnnnnnnnnnnnnnnnnnnnnnnnnnnnnnnnnnnnnnnnnnnnnnnnnnnnnnnnnnnnnnnnnnnnnnnnnnnnnnnnnnnnnnnnnnnnnnnnnnnnnnnnnnnnnnnnnnnnnnnnnnnnnnnnnnnnnnnnnnnnnnnnnnnnnnnnnnnnnnnnnnnnnnnnnnnnnnnnnnnnnnnnnnnnnnnnnnnnnnnnnnnnnnnnnnnnnnnnnnnnnnnnnnnagttgggtagaataccttctacttctatcttgtgaaaaagtttgtgcagaactggagttagatcttctttgaaggtctgatagaactctgcactaaacccgtctggtcctgggctttttttggctgggagactattaataactgcttctatttctttaggggatatgggactgtttagaaggtcaacttgatcctgattcaactttggtacctggtatctgtccagaaatttgtccatttcgtccaggttttccagttttgttgagtatagccttttgtagaaggatctgatggtgttttggatttcttcaggatctgttgttatgtctcccttttcatttctgattttgttaattaggattttgtccctgtgccctttagtgagtctagctaagggtttatctatcttgttgattttctcaaagaaccaactcctcgtttggttaattctttgaatagttcttcttgtttccacttggttgatttcacccctgagtttgattatttcctgccgtctactcctcttgggtgaatttgcttcctttttttctagagcttttagatgtgttgtcaagctgctagtatgtgctctctcccgttttttcttgaaggcactcatagctatgagtttccctcttagaaatgctttcattgtgtcccaaaggtttgggtacgttgtggcttcattttcattaaactctaaaaagtctttaatttctttctttattccttccttgaccaaggtatcattgagaagagtgttgttcagtttccatgtgaatgttggctttctgttatttattttgttattgaagatcagccttagtgcatggtgatctgataggatacatgggacaatttcaatatttttgaatctgttgaggcctgatttgtgacctattatgtggtcaattttggagaaggtaccatgaggtgctgagaagaaggtatatccttttgttttaggataaaatgttctgtagatatctgtcagatccatttgtttcatcacttctattagtttcagtgtgtccctgtttagtttctgtttccatgatctgtccattggtgaaagtggtgtgttgaagtctcccactattattgtgtgaggcgcaatgtgtgctttgagctttactaaagtttctttagtgaatgtggctgctcttgtatttggagcatagatattcagaattgagagttcctcttggaggattttacctttgatgagaatgaagtgtccctccttgtcttttttgatgactttgggttggaagtcaatcttatcagatattaggatggctactcctgcttgtttcttcataccatttgcttggaaaattgttttccagcctttcattctgaggtagtgtctatctttttctctgagatgagtttcctgtaagcagcaaaatgttgggtcttgtttgtgtagccagtttgttagtctatgtctttttattggcgagttgagaccattgatgttaagagatattaaggaaaagtaattgttgcttcctgttattttagttgttaaaggtggcattctgttcttgtggctgtcttcttttaggtttgttgagggattaccttcttgttttttctagggcgttgttcccgttcttgtattggtttttttctgttattatcctttgaagggctggattcgtggagagataatgcgtgaatttggttttgtcgtggaataccttggtttctccctctatgataattgagagtttggctgggtatagtagcctgggctgcagtttgtgttctcttagtgtctgtataacatctgtccaggctcttctggctttcatagtctctggtgaaaaatctggtgtaattctgataggcttgcctttatatgttacttgacctttttcccttactgcttttagtattctatctttatttagtgcatttgatgttctgattattatgtgtcgggaggaatttcttttctggtccagtctattttcagcttttcaggaaaaaatgttacctctgtctccactacagacatccgctagagtgtcagagcagccacggagaatacatcagcaagcaggcataactgggctcctatgaaacttggtaaaaatcagaggatgggctagctttggctaaaggcttacccggtgctgggctcagccccctgtttaaccccttcatcgcccttatccctgtttgcaatgaccttcatttcccaactgtctctttcctttcctttgtccatctcgctccactctgaaactgatgtattttgaacaccactgcagcatcacctctctgactctccggctcatctagaacagaacctttgttgctttgtttagcgtatctgtgtccaagaaataaatcactgcttgccttccagatcagagaggtttagtagaaagtagatgctaaaaattaagtgttgagggactggggaggtactggagtctgtaacacactgatcatcaagcacagggacttgagtgtgcaacctgaacatccacatacaaagccaggtgtggacacgcacctgtgaccccagtgctgggcgctgagcgtgcagatccctggagctcaccaccaacagcctaactggacagatgagctgtgggttcagtaaaaggtctgtctcaatgataataataaggtataaggtattgagatgactcagtggctaaaggcatttgccctagcacctacatggcggacggagaccttcacacacatgcacatattcacaattgcacacacacaaacatacacacagagataaagaaaacacttaagaataatacatacatctttaaagaatgtcttgttgaatcaataaatgtctggaccactgaagatgatccataagtatgtgtcagtaagtaagtgtgccatgccttgcacacatgagaccgtcatgtgaattcagtgagctgatgcccagtgtgcaccgcggctctggttcacagtaagtagatgcctggttggcgactcttctaaacacatcggtgttccctttggctttcagaggaggctttgaagctgcacaatgggccacctcgcagtgcctacatggagcagagtttccagagcctgaacccagtcctcagcctgcacatcaatcctgcccaagtcgaacaggcccggaagaatgcagccttcaccgggacagcgctagaagcctggctggactcgctggtgggtgggacttggactgccatggacatctgcaccacaggccccaccgcctgcccagtcatgcagacctgcagccaaacagcctggagttccttcagccctgatcccaagtcagagctgggtgcagtcaaacctgacggacggctcaggtagcactggccacaggggaccgatgcagcctcaaccctggcccctgatcttatatgagggagggggaattccttttgtataaggacctcggccgactgtaggacagtggagagagagggtttggaggccagagagaagtcagcctgtatttgtgaagctggtctctgggctaggtgacccagtcccggagctacagtggtctccctctaccagttgtcgctcagtcctgcaggctcctgttctccccctccgatggcctgcacccctacaagtgagttttaaacttttattttgagcggcagaactttgttgactcggcacggtcggggtggaagtgcaagaccaagatgaagtccaggctgctctggttgaagctgaggttgtgtgaggttccttctcaaaactcagccctccaggtagtcctttgccaagggcatctctaaggtacctcttctgaacccaagggctctgtttaagccagtttgacaagcactgccctgacccagggtgggatcgccatcccagcccttccatttatctcttagtttctgtggctgggaaaccctgtgcccgtgctaaaagtatcgagctgctagaagccctgctcccggccttcccagggaggcggagacaggggaggcttccaaggttcctgttgccactctgtaagctgttttctctgaaaaccagaggttcaggatagcctttcgatgtgaagcagccaaggtccccagacatgtgactgccaacttgccatctgtcctgatcagcctcttccaaggctgtcacaaatggtaacaggaacagggtaaagcattacagagcctgagcttcaattctccttcgtgcccctgggctaggagacagctactgtggcctcttcggtacttgaaagtgggagcggtgccgaaccggggctctgaatctcaaaggggattatgtggacccaggcttctgacctggacagctgcacagtaacaccccttatattctgaggtcaggcgccccagacctttgtgaactgtgcccttggtgctgttggctgtgaccaaactgcatggatcagacttctcccacgcaggaacaaacatttcagattgggtccttaatttcatatccttcctcgccagggtgcccacaggctcagcctggccataccacaggagaataaagttaagtttcaacagtgggaaggtagttcagaaaatagtgttattcatattgcttgagttaccagaaacccaagggtcttcttgccatgtgtattcaaggggcactgaggaagagcaccccttcctcctggagtctcccaaatgagagttctctaggaaaagtttcatccattcttgtgtctctcccagcatggataaggtactgaagtccaccttgatgtgtcgactgcacagccctttccccatctaacatggcgggcatagagaagggacccttgatatttattatttatatgttttagtcaatgactaattagtaggtgctgtttttgcagcttgtcaattatgttatcttactaactgaaattgcctttattcacaaaaggctcccccacccctccctttccctggtctgcctgcctttctccctcatcctctctctatctgtctctcagtgtccaccctacatcctgcacagtttcaaccagtgctcccactctcaggaagtagacccatttggatggctggaacctcctctttgcttacccaggatgctggtctcacctgtccctctatattcaaaagtgttacaatgcctgagttctctctttaccctgaccgctgacctatggacgaggatgcgatgggctcatggcttggggtcggagaagtgtgccaagtctagaactatagatctacccagtttaaccatgagcacaagctatcactagcagaggaagacaggctccttccaagaatgattgatcttaggaggaggaatgggggtcagacccaaaggagagctcaggaggtagctactgtctgtgctggtgggggagccttcagtgtcttcctctaaaaacccacaggatttacattgcttttactaacccatgggaactgtgagcccagtgccccattctctcaataccccgagcctttgccttggtcaaagcttctctgggactatggaacctctttgagttcccccttgacctctcttgttttaaagatttgtgtattctgtcctggaaggtccctgggatccacagactctgagacagggtctgtctagacccagtgacactcaatgacatttttcatactggaatgcacttggaaatggcagagcctacttcctctgaagacactcctctccctctttattcaccacaagtaatttgaggatatttgtttcctctggtttttgacccagagaataatttttcttttagtaaaaacaaacaaacaaaaacaaaaaaatggagaatttaaaagaagttcagcataatttaagaaaatatgttttcctatggaaaatggcataactccttatttcttggtgttctcctgcctgaaaaccatgtatttgttggaggctattggtgaaacaacagccttgggaggtggctgcccaagagttttgaaaacacagaaccatcatctccgggaaccttaaagtctgcagcctgcagaagcaagaagcctgggtttaacgctgaccaggtcccttatgggaagaagtatttgagatggcacctctccatgccatttggtaactatggctcccaaagccaacttcccaggctgtgcaggctgtgtaagtctctgagagggaagggagcaactcccagtgccccttggctttaacaatgaagttctttttctgttccccaggtgactttctggtggagatcaggggcctcctggtttcatttctcattattggtttaactttttaaactgagattaagtttagagggtatgaacacagccacacaaacacacacacaggcactcatacacacacacgcacaagcacatgtgcaaacacccctaaggggtttgttgctactttggatgtagtctgggtatttacagagcataaccccttctggttgtctagttttccgatagataagaggatgttcattgaaactgtaacctctctcccaagacactccataacagagaagagcaatcaatggccacaaagtgtagagtatgaagaagaaaccatttaccaccgagttcatgagggttcggatcagcagttcctgagagcattgagaataggcttgaaaccagtgtcaaccttgtgagcttgagcatgcagagaaggcttgccagaccagagaaactctaccgcgggggccataaaagcataatgaggtccgggacacaagcatagatgggtaaaaccacaggtgaaagacaaaagggagtggtggggagtgtggtcttactggcacgcacatgaatcctctggtaataaaggcagctgtggctcagctcccagcttattacagcaagcaagaaagcaaaactcattgcagtggactctttaagctaataagggaagccaaatatatccagctcctgtttgtttttgtttgtttgtttattgtttttgtttgttttgtttaataggaaatctagttgttcaatattggctactattattttaattttatttatttatttttaaagatgcgggcagaaaagtagcttcatggttgtgcttaggcaaaatcctctttctggaaaggtgggttgaaatgagggaaagaatttaggggtaaggagtcatggaaagccagagttaagagtgcaaaaagaacagctcacattaaactataagactccaggtttctgcttagtagttccctcctgagaaaacctgtcttctgcaggagggctggctcattcacttccctggcctgtgctgacgaggaaagagtgtgacctggggtctgaggtttgaatctgctcaggcctccaccttcgggcattccatcaaaccaagccgagatggcaatggtgccatccttaagatgaggctggggagtactaggtcccactccagagtccgcatgctgccactgtgctggaaggttcttcagaaaccacaaggggctgtgctagcttaagtagtcttctttgcttctgcctcagttaccttactttgcccaagggtcaacccaggcactacctcaatgtctgctgagaagtttacctgggggtggggcggaatgaaggtgttacccatgctgaagctgaatgtacaatctatgcaaatccctctctctctctctctctctccctctctctttccccctccgtccctctccctcagtctgactccctctttttctttcccttttacttacaagcctgtgtgtgtgtgtgtgtgtgtgtgtgtgtgtgtgtgtgtgtgtgtgtgtgtgtgtgtgtgtgtgtgttatttttttaaccttatgaacaaggacctcttaagaccgaggagggttgtcacccaccacctgtgtatgtccctcctgttgtctttggttctgttcttgccaagcccccacactgggagaaagtggcctctctcctcccctcacttggctaggaatattctcacagcttcagcctgcagacatcaccaggaagcaggcaccccatctcacctcccccatcacagcaccgtcttctcctttctgcatttttctcctacctccccaccttcatccccacccctctaaaaagccttaggtttctccgttttgaaatgtggccttaaaattatttttggaaagctggcatcctccccctctaatttcccccaccatcacagaagagagaacatcttgaagcctgggtgtgtggcggcctcctgagcaaagggactgccaatctgtagtctgcagatgcactaggaatgacttaaatgtcatctttaagaaaaaatgttctcatattttttcctatgggcaaaatgaagtcttggctgctcgcgcagttctgagcactctccgtgttgccgtggcactggctggcaccaccagcagatgttcactacagcttcagtctccccttccctcgggacccagtgactttaggtacttcatttaaggatgaatcaggagtgtttctccgtgtatcgcttcatctttcttgcctggaaagtgacagcatggagtattcccagtggataggtcacgttcttgaaggggtggtccactctgtccttcagactccacctagaatccccttccatcactccagtgctgatggaagccaaagacaaccccagggttttcataggaagttcgctggtattgggcataattgtctttatccatcgatctttacttttaaaggaaaaaagagagaggctcctcatgtcatctgtagcatttgtcttgatgtttgtttttagaggcctggagataagtcattactgcctccttctttgttttcaaagatatgtggtgatatagtttttaaaaataactattttgttatagatcataatatgcataaaactgtacagaaatattttgtaatgtattgattttaaaaaagagagaatctgtaaataaaagtttaaaaaaataagagagagttcacatggcacacactgaaagatgtagatattttgctatttatttaaaggagtaagtattttaagagatattaaactatctgaaattgaccaataatgaaagttctaatcatctgaagacttgccatccagtcccgttctcgcagacaactgtgttaccgcccatatctgcctctttcctgtcttttgattttagcagaaaacaacaacaaaattgtgccttagctgtatttctgtctaggggaatttgtttctgtccaacaaagcaacttttttttttttttgcagaaaacagtggattattaaatactgtattataccaaaaacaccacaggtgtacatagacgctttctgccatactgtgttttcagatgcagaattttaaaataaaaaaaaaatgtctctatgaaatctcattttatggttactttttagcaatttcaacaccttcacatacccttcccttctcttccacaccctgtgccatctcagctggagtaatcttgaaagttgacactaactggaaggatcctgaggccatagacaggagttgggacatgagggcacacctcccttaagggctactgttatctccccagaagataattatagcaccctctggaagagtttcctctagctagagcaaaagaatataattttcaatataagtttaaacacctctttgcagagaaaaggggtgagaggctgtcctgtaaaatagaagtttttaatatctgcctagaatctaggtcctagatggacatggagcaagcctggcatcttgcccacttcagcacacaactggtctacattccctagatggcctttacacttccctgtgactacatggccaactgtcaatcaatgagatgctgacatcaatgaaatgggcttatgataggtctaaccctgtcccatctgacctcccaggagccccagtggctccaccattcactgttcagctcagatgctttgaactagtgtttttttaggagatatcacagcaatattaaagagggcagagccacaacacagaaggagcctagaccctggatggacatgaaatttcacttggcctaagtcacctctcttgacaatgacaggaaaagaaacctgtgggggtagggtagggggtatatgtacgtgttcatgtgggtatacatggaggaaagcatagatcagaaattgacattagatgtcttcatcgattgctttccacagtttttgaggcaggatctctcatggaacctagagttcagtgattcagctcagatggttgatcaacaagattcacagatagatccatctagacttccatcagcccctgaaacattttaatgcaatttgcttgtagcagctaatagtatctcaaatccatcaagcactagaaaaccaagtcatagcttcttcattctataggcaaagctatagagagatacatggctgaagccattcataatcatgtccagaaacatgagcaagtcccagagaccagaccatccacttttatgatgctcatatgaagtttctgaaagccatggccaaaggctgggaatgcctatctggatgtgttgtggcgatccctccgactcagcctttggagtctttacaggcaaagaatagcatgagattcaaatgttagcagcaagaacaaaacctgctggcagttttctcattaaacaggcactgggtaaacccagagagagctgcaccagcatcagcctccctgacctggacttgggaaagagggtgggcaactgcacactgctgaagacgaatggacacagcatgatgcatttgccaagcgttttccactttttcttgatgccaacttcatccaggggtaacttctcaaaaataggcctagtagcaaagaaagagcaaagttccaacatctctgtaagagcaagggtcatgggcgccttggttgtttagtcggctgtttctggtatttaagcacagggggtccataaaatagacactttgtgacaatttcatgaatgaacaagcaagtgagcccatttttcttaattaatactacagacatgaggtcatttgtccaaaatactatgttgacattcatcatttgattgatgatacttgtcaaaacatgggttaatagaaagtaaaccttcattttcacctctaataatgaggtttcttagaacatggcattgaaggctgcttggaatttctttcatacctcatttatttgagcagaggttccttcaaattcaggaatgtggtaaataccccatccctcctgggacatagagaatagcaggactttatttaaatctatctcactaatagttgaaaaggcctttctctctctctctctctctctctctctctctctctcccttccttccttccttcctttctttgtttccctttctgttctttgacagtgttgtttgttcacatatggacgtaatcagtttggttcgggtcctttccaccactcccatcgccctctatagtcctctttcctctcccaacttgttttctcacactgatgtctcttgttagtggcctgctgagttcatttctggttgtttgcatgagcataagtggagttttatttactggaaccatttcttaaataaaagtgaatgtctattaaagccccaacatataggagagacttaaatatcagacttggaagaatgccccaattggaactggagcataaagttctgccttagcagccaaccctttggtattcccaggtgttaacaggtaaaaatcctggtgaactcagtgctttaccacacccatacttccagtgggaggagccatggctcctgtagagctctgtgacctttttctgagggctctatatatctgttgtgtctgtgtgtctatgtctgtatctaagtgtgtctgtatgtttctgtgtgtctatgtctgtatctaactgtgtctgtatgtgtctgtgtgtctgtgtatggtctgtgtttgtatgtctgtgtgtgtctatgtctctctctgatgtgtgtgtctgtgtttctgtgtgcctgtttgtctgtgtctatatttctgtgtctctgtgtgtctgtgtttctttgtgtgtctgtgtctgtacatgtctgggtttctgaatctatgtgtctgtgtctatatgtctgtatatgtgtgtctgtgtcatctcagagagagaaggtgatgacaaaccaatggaatgattctatccaattcagtttggtaaagcaatgagttaactagggatggctccaggatcaggagtgagcatctacgtatagaatcgtggatgaggatgagtccctcagagtatggatgaggggttactcatgggaatgggaatgcatctggcctttttacattggttggaggaacagactcagtagtcaggcattcatagtatcattggtaaatttgctcctcaactagacacacctgagaagagtgaatctcaattgaggtattgcctccaccaaattggcatgtggacatatgggcatgtggtgacagcattttcttgattttgttaattggtataggagggcccagaccactgtgggcaggaccatctctagacatatgggcctaagttgtataagagagctagctatgaaagtcagaaggactgccgggcgtggtggtgcacgcctttattcccagcactttggaagcagaggcaggtgggtctctgatttcgaggccagcctggtctacaaagtgagttccaggacagccaaggctacacagagaaaccctggctcagaaagaaagaaagaaagaaagaaagaaagaaagaaagaaagaaagaaagaaagaaaggaaggaaggaaggaaggaaggaaggaaggaaggaaggaaggaaggaaggaaggaagaaagaaagaaagaaagaaagaaagaaagaaagaaagaaagaaagaaagaaagaaagtcagaaggaacaaatgagtaagcaaaattcctccatggtctctgctccatctcctgctctgacttcattccatgatgggctatggcctactagccaaagcaaacctattccttcccaagttgcttttggtcatagtactcatcacaggaacagaagacaaactaggacacacaacagtgcttttacctgctgagccgtcactggacctgcacagaagtttaatcagtaaataatttattgaagcttgagcctgtgggaaatagcagcattaagctctggggttcaaggccaaggcatccacaggaagcctggagaagagtgactgggcttcagccctcccaggcctctttctccatgatcgctgactccagctcctatgccctttcagacagactgctgactctacaaggtatataaaggagatcccagaggttgctgcttcctgccaatcaaactccctcaaaaaagatattaacaccccttcttcttgttgggaaaaaaaaaaaagatgagtttgactc

SEQ ID NO: 378 - DNA, 2477 bp, Mus musculus
gatggctacttctctcaccgtcccaaagagaaagttcggaccgacagcaacaatgagaactcagtccccaaggactttgagaatgtggataacagcaacttcgcccccaggacccagaagcagaaacaccagccagagctggcaaagaagccccccagcaggcagaaagagcatttgcagagaaagctggatgcccaggacaaacgacagggccagtcagtcctggggaaaggccccaaggaggtgctgcctcctcgggagaaagccacaggcaacagtagccaagggaaggatctctcaagacacagccatgccaggaagagtggtggtggtgggtcccccgaaaccaagtctgaccaggcccccaagtgtgatatctctggcaaggaggccatctcagcactgacccgcgctaagtccaagcattgtcgccaggagattgcagaaacctactgtcgccacaagctggggctgctgatgccagagaaggtggctcgattctgtcccctagaaggcaaagccaacaagaatgtccagtgggatgaggatgctgtggagtacatgcctgccaacccagtcagaatcgcctttgtcctggtggtccatggccgtgcctctcgacagctacagcgcatgttcaaggccatctaccacaaagaccatttctactatatccatgtggataagcgttccaattacctgcatcggcaagtgctccagttctccaggcagtacgacaatgtccgagtcacctcctggaggatggccaccatttggggtggagccagcctcctgtccacctacctgcagagcatgcgggatctactagagatgactgactggccctgggacttcttcatcaacctcagtgctgctgactaccccatcaggacaaatgaccagctggtagcatttctttccagatatcgagatatgaacttcctgaagtcacatggccgggacaatgcaaggttcatccggaagcagggcctggaccgcctcttcctggagtgtgatacacacatgtggcgcctgggggaccggcggatcccagagggcattgctgtggatggtggttctgattggttcctgctaaacaggaagtttgtagagtatgtggcattctccacagatgacctggtgaccaagatgaagcagttctactcttacacccttctccctgctgagtcctttttccacacggttctagagaacagcccccactgtgacaccatggtggataacaacctgcgcatcaccaactggaaccgcaagctgggctgcaagtgccagtacaagcatatcgtggactggtgcggctgctctcccaatgacttcaagcctcaggacttccatcgcttccagcagacagcccggcccaccttctttgcccgaaagttcgaagccatagtgaaccaggagatcattgggcagctggactcttacctgtacgggaactatcctgcgggcaccccgggcctccgctcctactgggagaatgtctacgatgaaccagatggcatccacaccctcagcgatgtagccctcaccctgtaccattccttcatccgtctgggtcttcgaagagctgagtcatccctacacacggatggggagaacagctgcaggtactacccaatgggccacccagcttctgtccatctctacttccttgctgaccgattccagggctttctgatcaagcatcacgtgaccaaccttgctgtgagcaaactggagacactggagacatggatgatgccaaagaaagtcttcaaggtcgcaagtccccccagtgactttggaaggcttcagttttctgaggttggcactgactgggatgccaaggagaggctgttccggaactttggtggtcttttggggcccatggatgagccggtggggatgcagaaatggggaaaggggcccaatgtgaccgtgactgttatttgggtggatcctgtcaacgtcattgcagccacctatgatatcctgattgagtccactgcggaattcacacactacaagccccctttgaatctgcctctgaggcctggggtctggacagtgaagattctccatcactgggtgccagtggcagagaccaaattccttgtggcacctttgaccttttccaacaagcagcccatcaaaccagaggaggctttgaagctgcacaatgggccacctcgcagtgcctacatggagcagagtttccagagcctgaacccagtcctcagcctgcacatcaatcctgcccaagtcgaacaggcccggaagaatgcagccttcaccgggacagcgctagaagcctggctggactcgctggtgggtgggacttggactgccatggacatctgcaccacaggccccaccgcctgcccagtcatgcagacctgcagccaaacagcctggagttccttcagccctgatcccaagtcagagctgggtgcagtcaaacctgacggacggctcag

SEQ ID NO: 379 - protein, 822 aa, Mus musculus
  VARIANT (1)...(822): Xaa = Any Amino Acid
DGYFSHRPKEKVRTDSNNENSVPKDFENVDNSNFAPRTQKQKHQPELAKKPPSRQKEHLQRKLDAQDKRQGQSVLGKGPKEVLPPREKATGNSSQGKDLSRHSHARKSGGGGSPETKSDQAPKCDISGKEAISALTRAKSKHCRQEIAETYCRHKLGLLMPEKVARFCPLEGKANKNVQWDEDAVEYMPANPVRIAFVLVVHGRASRQLQRMFKAIYHKDHFYYIHVDKRSNYLHRQVLQFSRQYDNVRVTSWRMATIWGGASLLSTYLQSMRDLLEMTDWPWDFFINLSAADYPIRTNDQLVAFLSRYRDMNFLKSHGRDNARFIRKQGLDRLFLECDTHMWRLGDRRIPEGIAVDGGSDWFLLNRKFVEYVAFSTDDLVTKMKQFYSYTLLPAESFFHTVLENSPHCDTMVDNNLRITNWNRKLGCKCQYKHIVDWCGCSPNDFKPQDFHRFQQTARPTFFARKFEAIVNQEIIGQLDSYLYGNYPAGTPGLRSYWENVYDEPDGIHTLSDVTLYHSFIRLGLRRAESSLHTDGENSCRYYPMGHPASVHLYFLADRFQGFLIKHHVTNLAVSKLETLETWMMPKKVFKVDPSDFGRLQFSEVGTDWDAKERLFRNFGGLLGPMDEPVGMQKWGKGPNVTVTVIWVDPVNVIAATYDILIESTAEFTHYKPPLNLPLRPGVWTVKILHHWVPVAETKFLVAPLTFSNKQPIKPEEALKLHNGPPRSAYMEQSFQSLNPVLSLHINPAQVEQARKNAAFTGTALEAWLDSLVGGTWTAMDICTTGPTACPVMQTCSQTAWSSFSPDPKSELGAVKPDGRLX

SEQ ID NO: 380 - DNA, 170489 bp, Homo sapiens
  misc_feature (1)...(170489): n = A,T,C or G
gaaactatgttagtgtttcaggccaggcgtggtagctcacgcttgtaatctcagcactttaggaagccaaggattgcctgagcctaggagtttgagaccagcctaggcaacatagcaaggtcctgtctctacaaaaaatttaaaaagctgggtatagtggtgaaagcctgtgtagtcccagctactcaggaggctgaggcaggaggatcgcttgaggtcaggaggttgaggctgcagtgagtcgtgatcataccactgtactccagcctggggaacaaaatgagaccctgtctcaaaaaataaataaataaaaaagaaagaaagaaagaaaaagaaaaacaacgttagcatttcattcaagtctttataggtaaagctgagaggcccagtagaaaaagggggcagaggaggctgactagagtttgatcaaggactaactcttgacagcaggtcattcttcctccctgaggatgattcaggacttgaggggcctgggttcctctctctataggaaagtatttatcggctgggcgcagtggctcacgcctgtaattccagcactttgggaggccaaggcaggcagatcacctgaagtcaggagtttgagaccagcctggccaacatggtgaaaccctgtctatactaaaaatacaaaaattagtcgggcatggtggcgggcacctgtaatccgtgctacttgggaagctgagacaagagaatcgcttgaacccgggaagcggaggttgcggtgagccgagattgcaccactgtactccagcctgggcaacaaagagcgaaactccgtctcagaaaaaaaaaaaaaaaaaaagtatttatcactcaacttcgatttctatctgttctgtgtgtgtgtattgtgtatggaagtaaaatacaaatcaaaaggcttggcatgtagcaaaacagcctacataaaagaatcctaaacttttaattttaataatcagtaaatatttctgattgtacttatgtattatgtcagtagttctcaaacttggtctcaggattgctgtatagtctcaaacattattgaggaacaccaaagagctttggcttaggtaggtgctatcaattacttcctatatagtaatatttaaactaaggcattcttaaaatgtttattaattcacttaaaaacagtcataataacctattacttgtgtatataaaatatatttatgaaaagtatgcatatttttccccaacgaaaacaaatttaggaagaagggaggcactgttttacattttttgcaaatctctgtaacacctggcttaatagaaggtagctagattctcacatttgcttctgatttctgatgcagtatgacgtgcagtggagtttctggaaaactccactgtacactcatgagagagtaagcgagaaaggaaaataatgtctttatattatcgtgaaaatagtttgtcattaaagatcccctgagaaggcctcagggacccccaacagttcccagaccacactttaagaaccactttaagtcaccattgcaatcattaattctattttaataaattatacctaatatttattaagttctaggtaaagttaagtgttttaaattcattgactcttaattctcataacagcctcattagattgggtactcattattgtccccattttacagagaaggaaactgaggcagacaaagttaggcactgtgccctgggccacacagtgagcaaaggccagggtccagatttcaacccactgtgcctcaacactctgcctttccaaaaagtctcagtcttggccgggcgtggtggctcacgcctgtaatcccagcactttgggaggctgaggcgggcggatcatgaggtcaggagattgagaccatcctggctaacatggtgaaaccccgtctctactaaaaaatacaaaaaatattagccgggcttggtggcgggcgcctgtagtcccagctactcgggaggctgaggcaggagaatggcgtgaacccgggaggcggagcttgcgatgagcgtgatcgcaccactgcactccagcctgggcgacagagcgagactccgtctcaaacaaacaaacaaaagactcagacttgctcatcaagtgacaaggcgctagcttaaaatatcatcctgctgccacttgagtgcttaacatgtatcaagcctctcacccaatgttgttttgttaaatagaattatatgtgcatgacatattagttaatccccaccttacatttgcaaagtaggtcttcttacccccttcttttgtagatgagaaaaatgaggctctgagaggttaaacctcttgccctccgtctcagagttaaggagcagagactggattccaacccagccctatcagtctcactccttcctgcctcaccctgtgctgttttgcatcccattaacatgatgctacattgcaaagggctttttacttagggttctgttaaagcagggcctgcctgcgtccagcgtggtccacgggtttctaagtgctggccagccaccttttgtgcatgcagatgagctgggcgaggggcctctgttaggtctatttgcattggcagcctgggtaattgcatgttctaattggtacagccacacacactgtgcttccaccgttcgcctaccctggcacggaggtccttttggaagcaggtgcaggcctctccctgtttgtccctcccagtggccttggtagccttggtgattggaacgaagcctcggacactgagttcaacaccaaataactacccagccggctgtgcgtgcacatggcacaaaaggaagccgtaaactgatcacgatgagcgggtgggccgggcgccctcatgtgtgagcagtgcacctggctggggtttccctttggccctgtccctattcctaatagctgcggagaggcagtggggtattgaaaggcatgacctccagacctagacagcctgggttcaaatcctggctcctctgtttcctaggtgtgtggacttagtcatttaacctccctgaaccttaatgttccaatctgaaaaatgggtagaaaatatagcgtcttctttatcagctcatcatggagattaaatgagttagtacatgcaacaggcttggaacggaacctaagacatacgtgtttcttaagcactttggacgtgtcaggcactatcttctatgcttgatcgattcagtccctgggaagtaggtgccatcttcggctctctgggatggatgaggaaactgaggcaaagagaggcgaaatgttctgtcccagcttgaagaaccccagcaaatggagaagggaggaatcaaactcacttcttcctgagtccagacctctgaatctcagtgtgctgctatagacgataatagagggatagggctgcagacgggatgcgctttgaagcttccattttgtcctcagttcctggtctcttaaggtccatcgaattgttttaatgagctgaagtggcagaattttgttcattgaatatattgattaataactaactcagaatggttagtaacacacattcgggacacatcattttacagataagaaaattggacatcagctaatgcaatactagtacccaggtcttctcctacataaacaataagagcaaaggtggatagtttaaaaatcacggcaacccacccccacccctcagaaatgggagcaaggggccaggattcagtagactaagtattgattcatcctgaaccaagagaacctgggaaaaatggaaacagacccacgtgtctttgcagcagcagcgtgggtcaggtaacctgcttctcggagccatattatgtttagcatatttctacctgattgaaattgactctaaacatgcccaaggttgaatgggaatggaggacattattgcatttaattatttctccagaataaaaatggattctagcagcagcttagaggtaaggcaacagcagagcaattagagttttggagcttgcacacaaacatttgaatgtgcaatcattgtaataagtacattaaaataaagtaagtcaaagggttgcattagcataaataactcaaggtgagagagttggattgatgaagagtagagaagatgatgccagttgatcacaattgcgaaataataacccatctgtcctctaggcagagactgtcaggggagagagagtgttaattggtagagttccccagtctggtttactgctcattcttcttccagctttgtgtggtgggcatattctagtagttttacatacactcttcctcactgaattacccaagaggtgaggtgttgtttgtttgttttgagacagagtctcactctgtcacccaggctgcagtgcagggcacgatcttggctcactgcaacctccatctcctgggttcaagcgattctcctgcctcagcctcctgagtagctgggactacaggtgcgtgccaccacgcccagctaattttttgtatttttagtagagacggggtttcacagtgttagccaggatggtctcgatctccggacttcatgatccgaccgcctcagcctcccaaagtgctgggattacaggtgtgagccactgtgcccggcctgagatggatattattatcatccccatggataccaaggtgttatcatcccaatgttttaaatgaggaaactgagacacagagagtttgaatcacttcattactagcagtgtagcctcggtcaagttatttaacctctctctatgttagtttcctcctcttaaggagtactaatactgtctgttttggtgagttttcaagaagattcaaaggacacagagcatgggccacttgggtgctgggcatatgatggttattttttatgggtctgcctggagacctcccaagattggttttgtgaagggaagggatcctgggtttggctttctggatcttgagtctccacagaaaggacagaaaagccaaaatctgtttgccccttggcagtcagatgaagagttagggggaacatgaagtgatatgtcatgtccatccttggatggctggataaagaaaatgtggcatatacacacaatggatgttagcttcaaaaagaagaaaatcctgcaacatacagcaacatggatgaactctgaggacattatgctaactgaaagaaaccagtcacagaaggacagatagtacacgtgtttattctgcttctatcagctatcgaaaatagtccgaatcctagaaccagagagtgaagtagtagttgccaggagttgggggattggggaggagcatggggagttgctgatggacaggcataacatctcaatcatgcatgcacaatgaagaagccatagagacctgctgtgcagtactatagccaacaatatagtagtacatgcaacaatatacaacaatttgctgtatgttgcatatagtactatagtgttgactatagctgcatagtcaacaataatacacacttaaaaattggttcagagggtagatctcatgttaagtgttattatcatagtagtcccagcacttttggaggttgatgtgggtggatcacctgaggtcaggagttcgagaccagcctggccaacatggtgaaaacccgtctctactaaaaatacaaaaattagccgggcgtggtagcacacacctgtaatcccagctactcaggaggctgaggcaggagaatcacttgaacctgggaggcggaggttacagtgagccaagatggcgccgttgcactccagcctaggtgacaagagtgaaactccatctcaaaaaagaaaagaaaagaaaaaaatgaattgaaggggggaagccagagagaacgccgcagtcactatagaaaatgacagtgactctgagggacagaaattctcaggcctccaattctcgctgactgcgcctctctctgacttttctggaagcgatctagtatctgtgagcccttttgttccagaagacaaaatattttccttccctcttatactcaaatcttttgggttcccatggcagctgagtagcatctggggccaggcagaagttcacagggccaccacaagctaatcatcgccattgtggtggcctgtcttgagtagagagcgggtattaatcatgagtcccatcagaatcaatggtggtgcctcttcctgatattacacattagccagaggaattggccattctctgattgtcagattagcttcattggccgtggggggtggagggagatgatcgcagtgttttctgtctggttttgcttggcaaagttcagccagaaagtgatggagaacaggagcttttgaaatgggggtttgtggaggttttctgttgtgtggcggggaaacttgctgataacaaggaaagagaagggccccagaatgacacttaggatatgtctgaagagagaaaacgaagatgtccatcagggcagtagctcttctggcttactccctgccctttagacatttctagaaacttctagaaaatgggcttagggacagaatttaaatttatgttcttggagcatgggagtcgtcaatagatttttctgtctgttggagggagaaaaaaattggctcctgtacctgactcagctcaaaggaagaaaggagatcaggttagctcctggattaatcgggatgagttagaccatgctacagtaacacagatcccccaaatctcagtgactcaaagcagcaggggtcaatttctgcacactgagggttggtagagtctctactccacatgggcctcactcagggatgcatgacctccaccagcaggagtgtggctggatattgtggtatccagggaatgacaccttatgggttccagtcactgctcttggccatagcatgtttcctgtctgtgcctaatatacaagggatagggacatacaatcctaacacatccctagaaggaatggaacagaaatgatttttcatagctttattgaatgccacccctgccccatcagctccatcccgacagacgctaatatgagcaaagatggtgatacccattattccactgcaggggaactgaatgcttcttgatttacttctcagcaaaacacaagaggcgtgatacaatagcagattttagaatcaggcagatgcaagttcgctgcctccccaacatgaatttgtgcaaattactcgacatccccaaccttattttccacccttttctgtaaggtgggcgaacagtagtgcctacgttggaaattatttccaggagttaagtgaggtactgcatccaagggcttagcatggcacctagcacgtgatccatagtgaagaatgtatcacaacaagcgttggctcctcgttctataaaatggcaagataaatacatccaattgtcagtaccctataagtaatacctgtgaataacttactgtggtgcctggctcatggtaagagctcagaaaatgcgcctgagaggctgcttgggactcttcaagggcctctggatagaaaaaaagggaaaagaggaacatcagcaggttttgtttaggttacaagaataaagatgtactctaggtaccaactgaaggggattttttttgtaggtatctgtggagaataagaaagaccagaagcagaaggccctcatttataggtcaggatataaaagcagttcctgtgtacaaccagtagccgccctgtgacccaatatggactggtcagctgtttttttcttggttctttttccttcttcctaccttgttacctcccagctcctgcagcctcaaactccacgtgcttcgtggctgctgcttactgtctctatatgacttcctgcaacacaataggccactagccagcctgaagattgcaatttggaggtcacacacctctagcagattcatttagctgggtgggaggggccagatcttgtggttcagtgtcagcttgcagtacttaagggttttgggtgatgggtgtaataaggatcatacaatttcttggaagtggatcatgtccctggtagcccagagtgtggggtctgtgatctgcctggtttgaattccagcttcaccgccaactagctgggtgaccctgggcaagtcacttgttcatgggtgcttagtttcccatctgcaaaatgaaagtcatagcagtactcagcttacagaatggccacaaggtgtcttagtgtcagagcctccaacaaataggagaaattcgtgcttactgctaggagcaatggagcagaggctagaggagcatctttttttttttttttttttttgagacccagtttcactctccccccaggctggaatacattggtgcaatctcagctcactgcaacctccgcctcccaggttcaagcaattctcctgcctcagatttctgagttagctgagactacaggtgtgcaccaccacccctagctattttttgtgtgtgtgtgttattggtagagatggggttttgccatgttgaccaggctggtctcaaactcctcacctcaagtgattcacctgcctcggcctcccaaagtactgggattacaggtgtgagccaccacgcccagtcctaggggcaccttcttctccaggccatcactaagtcgtatatggatggtgaggacagaagcaactaacccagtcccagaggaggaggccttttaactcacactccagcagagcaggggtctgcatacattttcttaaagggctggatagaaatattttaagcttttcagaccagaaagtttctattgcaactattcactctgctattgtatcaggaaagcagccatggacaatacacaaatggacaggtatggctgtgtttcaataaaactttatttataaaaaacacaggcagttgtttgctgacctgctggggtgggagccttgctgagggtcagctgctcttgggtacccctgcagatccgctgttcaggccccgacacctttttccttgggaactggtaagaggcatatttcagccctccttaaaaggaggactagcagggatgccgcccattgcccctgtgtttccgtagcaacaagggcagctatatggagccattactcttctctgtggcttcagaggtcaggggccgtgttgtaggacactggatatgctttcagattaaggccttgggaatgagctttaagcagaagcaacatgttgcagaaacaatttggggcattggttgaatgatgcatttgatcattcgactgatcaaagtaaccaggacccatttacccatggaggagctgagtttggggtccagcccttctggaaacatccatgccatgcgtggtctccagaatgactcctgatctttgtcttgaccccaaatgacttcatcacttctgttccatgtacacacatgaagagccaaactcaagcacaagagtgtcgcaagtttgctttgctccaggacttagtgtaaagtttattctacaagggctgcattcctcttaaaaaaaaaaaaaaaaaattgcggctggtttctttcccacagaatttacaacggctcagtctgatttctcttatgggcatagatatatgagcatgtcctaaaggcaatggaatgtatgtaatatcctaccaatatttttccctttataactttattatatcatttccagcccttaagtaaaccatcacagcactttcagctggaatttaaacgggacgctggaacaaaatgtttgttacccagtggcaaagacagtcaaggaaagaaactgacttgaaaaggtgtggttaataagaagcattgagaatcgtagtcatggcactttagagcttgaaaaagccttggtttctggttggaacatctcctatttccagatggggaaactgaggtccagagagagccatcttaccagaggttaaaccagtagcaaaagtaggatgtgaaactatggccccggcttccaagtccgtatgactcactcttcaaaggccagtctgcttagcatgatctctcagtcaagtttctcttctgtttctctcccctcttctccaggatggctacttttctcatcggccgaaagagaaagtgcgaacagacagcaacaacgagaactctgtccccaaagactttgagaatgtcgacaacagcaacttcgcacccaggactcaaaagcagaagcaccagcctgagttggcgaagaagccaccgagtagacagaaggagcttttgaaaaggaagctggaacagcaggagaaaggaaaaggacatacattccctgggaaaggccccggtgaggtgctgcctcccggggacagagccgcagccaacagcagccacgggaaggatgtgtccagaccgcctcatgccaggaaaactgggggcagctcccccgagaccaagtatgaccagccccctaagtgtgacatctcaggcaaggaggccatctctgccctgtcccgtgctaagtccaagcactgccgccaggagattggggagacttactgccgccacaagttagggctgctgatgcctgagaaggtgactcggttctgccccctcgagggtaagttccaaccccgctggctcagagagggatctcctggccacttcctcctcctgcccagccccattctgctcaccttctcagaccttctgagaaaggccaccctgttttccaaaccccagatgagcacacgagatctgatgtgttctagtactccctgagtgttgaagtcttgtatcagaaaaattttgcaaaatcagattaccttttgtaggtgctttaacccattgcctttatggcaaaggatgaaattatagtgaaatcgggagctgatgtgatgctggcaggagccaagggagctgtattgatatggtttcgtttctctttcagtagaatattgggattagaattgatatgaatattattgtaattgattatgatttgagaggtttctaattggttgcattaacttcagaggctctgtaactttccgttttccttcatcaaaagtttctttccctcttctcttctctttcttcctcatatgtttcctgtttccctccttctttccttctcattcctttattttctttctccctttttcctccctttcttcctcattttcttcctggtttgtttctccctttccttttcttccctcttctcattcccttccttattttcctctcttcccccttccttctttcctatttcctttcttccttattttaattttctttctctctcctttcctcttttcttcctattttctttcttcccttctacattccttcctgctttctgtcctcttctttcctaatttttctctcctccctccctcctttcttcttttccttccttcattctttacttccttccttccttccttctttccacctttccttgctctttgcttttcccctccctctttcccttcactggcactcttttatgtgcggatgacctgatgataaaccagctctcttgctgagacacggagggatccaagctctgatccagaaattcacaggcagagtggaggggccatctgaagatggggagtccagtttcactagcgcatgtgcaatcgtgccattgatgtgtatttcttggtagtgattttcaccttctctagtgcccttggaaggggaatgacagcagccacagggggctgctgaggcttcgctgtgtgctagacaccgcaccaggctctgtgcagtcaatttgtttatcacatccaacactctctgaggctgatgctgatgtcatgagcccaatttttttcagatgagagatgtaaaatccctctcccaaggtcacatggcctttaagtgatcttacaagcttactgttatggcaggaaatttcggacccactcagagtagagagaaccccaatgtaccatcacccagccacgtggtcgctggttattgactcgtggtcactgttgtttagggcacgcccccttccctcccgctagcccctgccaccatagcttacgataatccagcctctgggagcactcttaaattttacttttttccttggagaagatattctcaaaatgtttgtgaattcgtttgctcagtggttttctctgtggagagggcggatagcatccaaaaggcaccttcccacgaagagttggtgccactagcaacaaacagagaggaatgcatttgaaataaacgggtgtggatttcattcaagctcagctaccagctaacagggagagtcctttctgctctcagggcctagatttcttatctgtccagggagcagcttgcattctaggggtctttttgctccaccttccctgggagcctacttcactctttactcctggccatccctccttctcattgggccacactgcaaggccagcccagctgtccctcacaaagtggccaaaggttcacagtacccccttgtcgcttctaaatccaaataccaacccctgcttttgttatctccgaagggaaaagacccttaaatgagcacggaggccagcaaggaggcaacagagagctctgggggctccgatggggttgggggcatgtcagagtcgagctagatggagattggggaggtgtcagggtcaacagatgcagctggaagggatccactgaggtgctgctcaatgtcaaggcataaagtcagagaatcaagccagctgcagaattggggaggaagggctttccgttccaccggcatcggtgcatccgggagccatgcaaggctttgcctggtgtcctcctgagaaggcaaatggtcaattcacccaactctcttgatgaagaaaggaagtgcagcaagagaatggctccccagaaaagtagactaaaaagacctcttaagagaactcttcattcgctactctttttttttttttttttttcgagacggagtctcactctgtcatcatgctggagtgcagtggcatgatctcggctcactgcaacctccacctcccaggttcaagcagttccctgcctcagcctcccgagtaactgggattacaggcgcccgccatcacacccagctaatttttgtatttttagtagagacagggtttcaccatcttggccaggctggtcttgaactcctgacctagtgatccacccgcctcggccccccaaagtgctgggattacaggggtgagccaccgcgcctggtgagaactcttcattcgattccctggacagataagaacatgaggctcatagaggggaggagacttatgccaggtcccccagttaattagaggtgtttttcattttaaatatgtgcctctgtgtttaccactggtcacagaatagaggatttagatcaaataggaggtggccacctacactcattgcacagaaagagggctggatggatagacagcaaaccttccttatggcccccccatctgcagggacagggtggcagcagggacaactttaacaagtgcatctatattattttagtttctagtagcaagcatgtgtctgtgcaatacttttgttttctatctgttttgttttgttttgtttttttgagacagtctcgctctgtcgcccaggctggagtgcagtggtgccatcttagatcactgcaaccttcaactcttaggttcaagtgattctcctgccttagcctcccgagtagctgagattacaggtgcctgccacctctcctggataatttttgtatttttagtagaggtggggtttcaccatgttggccccgttggtctcaaactcctgacctcaaatgatccacacacctcggcctcccaaagtgctgggattacaggcatgagccacagtgcctggcctacacgatacttttaaatagaaagatttagaaagaaaagcttcctttctgccttgctgtttcacccttgtctaagtggtcgaggtggttcctgtctatattcttgattagatttggcacacagagtgtagcaataattaagtggagtgcaacgtttccagcatcttttgttaacctgtgcctggtggagaagttttggaggcctgagttgaatgccattccatgaacgaaatattgagctccttctgtatatcagagacagcacatttgttctgtgaagggccagatcttaggcatttgaggatttgggggccagtctttgtcacagctattcaagtctgccatccgtcatagggcagaagcagccagagaccacacatacacaaatgcgctatgttcccattaaacctaacttataaaaataggctggctgggtgtggtggttcatgcctgtaatcccagcactttgggagactgaggtaggcagatcatttgagatcaggagttcgagaccagcctggccaacatggcgaaacctcatctctactaaaaatacaaaaaaattagctgggcatggtggtgtgcacctgtaatcccagctactctagaggctgaggcaggagaattgcttgaacccaaggggcagaggttgcagtgagctgagatcatgccactgccctccagcctgggcaacagagcaagactccatctcaaaaaaaaaaaaaaaaaagaaaaagaaaaaaaggaaaaagaaagaataggccatgggccggatttggcccttgggcttttagttttcttaaccctgcaaaatgctatcactgtctatagttgacccttgaagaattctggggttaggggtgccaacctccttgcagtcaaaaaatagagcacaacttttgactccctgaaaaccttaactgataatagcctgtgttgactgaaagcttactggtaacataaacagttgataaacacatattttatatgttacttccattatttactgtattcttataataaagtaagctaggccaggcacggtggctcatgcctgtaatcccagcactttgggaggccgaggcaggtggatcacccgaggtcatcagttcaagaccagcctgggccacatggtaaaaccctgtctctactgaaaatacaaaacttagctgggtgtggtggcgcatgcctgtaatcccagctactcgggaggctgaggcaggagaatcgcttaagcttgggaggtggaggctgcagtgagctgagattgtgccattgcactccagcctaggcaacagggcgggactctgtcaaaaaaaaattgtaaataaataaataaatgtaagtaagctagagaaaagaagttaagaaaatcataaggaggagaaagtatatttactgttcattaagtggaagtggatcatcataaaggccttcatccttgtctttatgttgagttgaggaaaaggaggagaagaaggaggagaggttggtattactgctgtctcagggatggcaggagggaagaaaatctgtttataaatggacccgtgtggttcaaacctgtgctgttcaagggtcacctgtgctaatatgtgcaacactgccttgtcacactgtgtccccacaccagccctacaggctgagtctattgtgaaccctttttgtcagtgaggaaatcgaggctcaaggaaggggagtccttggccagaaacacatggccagcagatgacagagctggtactggaactcatgttacagagcctgtatccctttccataagcctgtccctcttggggaggcagaagggtcactttatctcacattgtcaagccccagaggtgttcttccacctgcaggctcgctctctctctctctctctctctctctctctctctctcaagttgcaagggagaagaaggcagggcattattgggaaaccaggggtgctgatgctgtcagtgcttaagagcctggggtggtggaggcagaccacgtggatctgaatcccaggtgtcccgtgcacaagctgtaggactttgggcaagttgcttgacctctctgtgcctcagtttctccatctgtaaaggggagatgagcatcatcacacttagcttagagggtttccaagggcctagtacacagctaagaactgtacctggtagtgctaatgtacattgcatccctatttgctttatgactgctccacagttgttcaaaaaaatcagaacctcagcatcttaggccaggggttcctgcacttctcctggtcatgctgaggttatctccggatggctttgcagtgtgagtttgccggagtttgtcctgaggcctttagtgcactggccaggatagcgcaccctcccaggacctgtgagctggttaataagattggcatttaaaagccattgcacacccagcctcagcgacgctttaatttgctacaccacagactcccccatttgcaataaatttactgtgaatagactaattgcaaaataaccctaattgggtagttatcaatgaacaacttcccatggaacaaaacggcttacaattaatagcatttaagccataaactattcttctgcagaaagctaagatgtaattacaccccatacggggattgtgttccctttctggaaaccatgacacccagatttccctctgcttaggagggatttgagcttcagcccagtggtccttttatttctttgctaaatgaggagatggagacaggggtggagggaaatttaatatatgagtaaatattcatatacatatgagcatacacacagatggatgccctgtgtttctcattttgctttacgcaacatcacctaaacttcagccaagagtgtgctggaagttgaatataattaaggaaacaattcctcatggctgcaagtctgaaaaattcaggggaagagaaatagattttaaatgttgactttggtacagcgcccccactcctcctgtccctcacgctctctgtcccctcaccccaccaccactcagggaaaatgtcgagtccagaagcccaggagatggtttgctttctgtgagacattccttgctcttgggacttttctcctttactttccagagaaaagggatttagaaggaagccccagctccatcccttttcggtaacagctgttttcacgaggggaagagggattcctctggctgtccactggcaaccgtgcagagggagatgcagtgaggtgtggggaagggactctgctgcatcacccccagtgatggcctccgagaaatttgttttgagccacacaccctagggtctctggtcattcaactggaacccctagtgtttcagggcaacgaaccaggtcagattgaaagtcaaggacagcttgggcaatggggtttaattcctggctctgccgttactcatgacataaccctaaccgctcagtgactcagtctgcacagtaaaatggacacaaaaactcatcttctgtctttatagcgtggttggctgaaatgagacaatgcatataaaatgctgagtgcactggggaagttaagtggatgtgcttggcttgttagtattaccacaatgacttttttttttctgcaattacttttgcaccaacctaatcgtcgcaatggaggagttgtctaaatgaaggggcgacaagaagaggaaaggagaggagaggaaaagggtttctttgatggtgtcagccattgtgcagccacgtcttgctgggtctgctcttcagacacagccccagtagcttccagtcctccccagccccctccctgtccccacaactcccactcaccccactttggctgttacctcttgcctctggagatcccaccctgaatgcgcttcctctgggaagccttccaggaccacctcttccccagaagccctggttgcagggaacacatggatcctgggtgaagggtgcatctctgcccctttcattgtcaaagcatcttttccaataaaggctgtttcacctgcgacccataggaggcaatctgtgccagctgccaggtgacacagctttttctgcctcattacattttgaacacctgcatgtcaggaagcgccctccgtgcagtggccctcacggccaccagcctctctgtgtcttgagttaaaatgtcccaagaaaggccctgctggctccttgcgttgctcctgcatttcttcccctttgctgggtctggttaagccaccacatagatgctgtaagtgacctgtgggtctgcagtctagacatccaggtgaagaattagaaatgaaaaatgtgagaagttccagggaagatgattggctgggagctgggtgggttggacttgagtggggaaccccggtctgggcatctgagtgaagtcggcagttctccaatgggtgatgggcaaaggaaattgcgcatgactggggaagctggcacaggtgttaggggtgaggatgaacagaagggggttctttgtggcagcaacaaaccgtctttacccatcagcctttgcaggaatggatttttggatatggggattctggggggaaggctggccgctcgctgcagagagagactggcagatgatactgccagctgcttaagggcagtctcttctacatccctcctgccctgggggcagtggggtaactacacagcgtgagtagccggcttctagaaagcatagctgacagccgcagtggagggaaaatagaactggggatgtcacaagtggtcccaggtaaatacctcagtttccccatttgtcagccagagatactactttctcccagatcctttgctgtatcaccaatgatgagaaaatgagggaatagctgtgaaaagttaaaaggtaccacgctaatgagggtgatgtgatgaagccacattgaccaggaacagcttggctaagtgggtggggttgacgggctttcccaaggcggcccttgcagttccaactgggccctttggcatctccttctgaggagcccaggaaggaagaggtatccagtaacagttcattggagttggacaaaactagtcccaaaggtcttccttgggcttgctggggaaaggcaagagactggcaaatccagagaacatcagaagacccattcattggtcagccaccacattcaaggctgtgctccaggacagggcctcacacacacagtttctataaagggccagatcataaatatttgggactttgtaaaatgcatggtctctgtctcagctattcaactttaccattgtagcgtgaaagctgccataaacaacacatcaacaaatgaccattgtgggcatgcttcagttcaagtcatttatggtcaccgaaatgtgagtttcacataattttcacttgttgtgaaatgctgttctacttctgatttgttttctacccacttaagatgtcaacccattcttagctcaagggccatgccaaaatagatagttacaggctgtggtttgccaatccttgttctaggacctggagttagagctgtgaacaagagcagagaacaccttgtgccacttgagtaccatgtccattggttctggaaatcaattgggcgtctagatggctgtaccctcatggagcttctacctgaataggagagaccagaggtgacaagtgaatagccacatctgcaatctaatgtctggatatgactctatgatttatttgaagacgttgagcaggatgagaggacaggtgaggtggggaaccatttagataggtgcctacaggctgtgtgtggtggctcacgcctgtgatctcagcactttgggaggccaaggtgggtgcattgcttgatgccaggagtttgagaccagcctggccaccatggagaaacaccatctctactaaaacaaaacaaaacaaaagttagccaggtgtggtggcacatgtctgtaatcccggctactcaagaggctgaggcatgagaattgcttcaacccgggaggtcgaggttgcagtgagctgagatcacaccactgcactccaacctgggtggcacagcaagactttatctcaaaacaaacaaacaaacaaacaaacaaaaaaactacataggtgcctagagaaggaacagaaatagatttggtctcattgtggaagaacttgctaagaattaagctgcttgcaaatggaacagttcctagtctttggatatgctgaattcctttattcatttaatatttattgagaggctgctttgtgcctgacattggtttagatggtggggaaagacatgccaggggcctgatcgtactcatctttgaatatctcgtgcttggcacatcataatcctcagtcttgccctcactgggaaagaagataacgtggttgcttttagcctcagtggctcaacctcccttcacactggggtctctacagaggcctgtgtgcaccaagcaaagcaatggaaatgggcatctagaatctctgtggaggtggtattctgagcatggcatccaccacctgggacctgaaactgtttgtcaccagctcccttcaatataccctcattcaacaattagtcatcgagcatcccctgtctatgccaggaactagtttggatggattcatttgggaggaaagcagatagaatccccgtcctcagggagcttgtggcctgttaaagttgggtagggaaacacaggggtaaacgatcattaaaatgtgcacgtaggccaggtgcggtggctcatgcctgtaataacagcactttgggaggcaggtggatcgcttgaggtcaggagtttgataccagcctagccaacatagtgaaaccccatctctcctaaaaatacaaaaattacctgggtgccagctactcaggaggctaaggcatgagaattgctttagcccgggaggaggaggttgcagtgagctgagattgcaccattgcactccagcctggatgacagagcgagactccatctcaaaaaaaaaaaaaaaaaaaaattcacatgtaaaattgcaacagcaattctggggagttgcatagttgtgttttatagttgagctaagagatgaagggtggtgaaagttaactagaggaaaagctggagggggacattccaggtcaagggagtatcgtgtgcaaaggccctcgggtaggcagaggtgttgatagtttaaaacactcacaagaccaacaggggagctcttcctataagcaaaaaggttaatctgctcgtaggccaagttgtaattcctaaaagtgctaggtttagaggatctgtgtctttgctttgagcaaggagaatggaggtagaggcatctctcagtactgaactgaaattgccagagacctgaggggaaggtaggcccccctgtattagtctgttctcatgctgctgataaagacttacttgagactgggtaatttataaagaaaaataggtttaatggactcacagttccatgtggccgaggaggcctcaaaatcatggcggaaggcaaaagacatcttatagtgtggcaggcaagagaaagagcttgtgcagggagattcctctttataaaaccatctgatctcatgagacttattcactatcacgagaacagcaagggaaaaactcacccccatgattcagttacctcccaccaggttcctcccatgacacatgggaattatgggagctacaatttaagatttgggtggggacacagccaaactgtatcagccccaaaggtaagggtctggcaggctgggactggggggcaggtctcacatcctctctctacagaatcatgcttcttccacttttgagccctgaacaagaggtcatcttggatcaggaaagcaacccctgcccccaagttcttagccctggatttagggtacacatctttggaggtctttcctcctcttacagtgctgtttctcatgacatccaagccatggaaggaaatcctcagtgcctccagcaatgtcatagactcagtgtcctgggctgtttcactatcattgacctgaccctggattaggagaagcctttgaaccaaactcaaaagacttgcggcccctctgccactttatcggctgcgaaagccttgaacaaggcacttgtgttctctgagcctcacgtctttcctataaaacagattgcacaagggcctcccctgcctcctcaggttgctgaataaaataccgtatttgagtgtactttcattaatccatcggtctagccagcaaatatttaccaagcacctgttacaagtcagccataggccacctctcgattggcagctcttgtggttctggaagcctgcaggtgggcatgggagactcgcttccatggcagggtggtttgtgatgattttcttggcgttccatgagttcttgcccagtagctgccccagaacaaggcagagaatggagattcgaagagcacatagaattcttgctccatgagaggcttgctcccttgggcacaactgattgtgtgtctgccacccagggtccccaagacagagacttagtgcaagaaggaaggagcccagacatggcccttgaatgaatgaatgagtgaatgagtgaatgaataaatgaatgaatgaatgaaataagccctagagtgaaaagactagctatctctcctttctgcataagtcaacaaaactagctggccttttctcctctctcaaattacttggcagtccagggctaggaattcatatcaatgccacttcctcctggaagccttctgtgatgctgtctccccacactgcacctctccaagtctgtgtgaggtgctcaagctgtgtgcccccaaaccaccttgcctgttccctgctggggtacatgtcacaggatagcgtggttgctggagtgctctgtagcccacactgagccacaagggctgagtacccttaattctgttggggacccttaggtgagactggctgctatagcatatcctgagtctccaccactggatctccagcccctgcctgcacggggctaggacacgagaacccacatttcttaggcacttcctgaatgccaggtgtggaggcgagcactttgcatgtgtgatctcatcgcgactcctgcacagccctggagaagggatgttctctagttccattgaacagacgaagaaactgatcctcagagaggttaagtagcttgcccagggtcacatttgcaagtgacagaccttagactcaaacccacttctgcctaacttcaaaacccacaccttaacttgtctgctctgtggtacccttagtaaatgtggaaccagatgtgttaaatgactgatctagcttctccagagataaaggaaaatgcactgcatgttaatcaacacctttctctagctattgatacttgttactctccatctctgcagccagaaagaacagggagctaaggtctctatacaagaaactgctcttaaataataacacttaacctctacgtagggattgttaaatgccaagggctatcctaagaaggtttagccacattaactcatttattcctcataacaactttgtattcaaagaagttgagacacagaaaacttacccagaattacacatttcaccagtagcagagccaggctctgagctcagagactttggttccagtggcgtggcaaggggcttaaccactgcactttggtgtctataggagcagctgcattcaggctgaagcaagccctttgcagcttacatttgctccttgtgctcaatctgtctgttgcaatgagacccacccacacagtcagataattcacctgcttttggaggcgggggcgccaatcccatccaagacgctaaggacttgtgtttgaagtcagttcattgcctggggtgagaaatagccagccgcggttacctcccatttctctgccagtttctagttgctgtggtatatttgtgttagtgtaaaaatgacaaagcaataatttttcattgtatccttcagtcacccatgagagattggatttaggtcacaatttattaccccgtggaattgaattcaatttttaacaccatgtcagtcattctggtgttagagccttttaatggctgtgaaatttatacagtgataaagtaatttaaaacatatgtaggaagaacatcagacaaattgatgtgtatagaaccctctggtaaaaattgaacaggagataaacacggaaaatggtgattgattaagagacgattgaaatagtgcttgctttgataaactcttaatggcgaaattagtaaactaatttattcttcgcaattttgaggagggtttatgttgccctaaatcagaatcgagctgagccacaaagcgcaaattaatagctcacctccaagtgtggcatggatagagtgagaaacctttcagaggaactgggaggctgccaagagccagtccccggtgatatttgcagcgaccaaagtgaaaagatggtgagaaggcagggaaaggagaattctcctcacgatttttaataacttgcccaaataatgcagaaaggatgcttgttaaaatctaattcctcaagtcaaggctgtatacattctcattattttaaaatactgaaacattgcagataaggggaaaatccaccctgatccgtcagtcccatctgagcagtggcacttgtgtgtacatttttgtttttctttagatatctaaactcaacacatgtcaaaaaaaagagtgtggttttgtgacaagagattcataaatcatatgaaactgatgtataaatctgaaacttgtaaaaaatatattaatagtatctggctgtgggatgaaagaattcacaagttagatgatttttttgttgttgttgcacatgtccaggtctgaggtctgtttccttgcctggagctagagacctaagttatttctttatagtagctgaccatataactctgggtatggatacaccacagtgtaattggtcattcccctattgagggacatttaggttgttgccagttttttactatactaagtgactgttttctcagatctctcaaagatgtacataactagtaccattctggatacatcagagaaaagctaatttgctacctacaatggatgccccaggacattcgagcttaattctcttggggatcctgagttgagactggctgctacagagcatctgaagaatagaattggcaggtcaaacagcttgcccattttaaattgtgatagacagcatcaaactgccctgtgaaaagcctgtattggttataacagtatatcctgtattggtcaccaacaggaccttgacagcctctaaaacatcctcatcttccatcctgcattctgcctgggatccctcttcaggtttcacgttagtaacatctctcgtgcctagtcctccgagatcccagcaattttcttgcgtggtcaaggacagtgcttgccggccacacttgggcttgtgttggcaacagaccccccaaggccccacccccagggattctgacccaggtcgaggacagaacctgagaaatcacacttctgccagaggctgctgccctccagaactacactttgagaagcccggacctgggagaacatcctgttccccctagttctgccctttccctgattcagtggtttgcaaccaatgctactgagcccctcgggacgtctggacatgcctagagacatttggttgtctcgactgggaaagggggtactactggcatctaaagcgtagacacgaaggatactgctcagcatcctgcaatgcacaggacatccccacaatgattttccagtccaaaatgtccatggtgccgtggccaagcatggtgggagacctgggcatctgcttctctccatggggcaagttcacattcggtatggacacattggcatccacagtctcactcctgggtgtgaaaagcctccccctcacccctctgactttctcagcccttgatgaccctttgcgtcctgaagacccctctccccagcctgaagagtccataatgagacacctcacattgattgctgaccgttgccgctccttgtgctaagcacatagaactgtgcttagcagtgaaagcttgagtcggtcggcttgggtttgaattttagctgtgcccctccctcactcgggaccttgtgcaagggacttcactgctctgttgcttgatctttaatctatagaatggggatgatgattggtatctggtttgcccaggacaatcccgatctgtgcctgtcatcctggtatagttagtaatggagcccctttttcctctcaagagttctccagtctcactctaacctgatgaggattctcctatagagtgagactggatgatttgtttcagataattcgtttgacctttagggagccatgcatgggttttgagcaagacagtgctgtgatctcatttagactttaacaaagggattggcaggcttttcataaactgaccataataagttatctggtcaccctaatgatgatagtcttaatagttctcaccttgtagggctgttgtgaggatagaatgagaggatctgtgtgaattattaaagcagaggctgtctctagaaagtgctcaataaaagttagctcttctgggtgtgtacctagaagaattgaaggcagagtcttaaagagacatttgtacacctttgtttataggagcattattcagagtagtcaaaaggtggaggcaacacaggtgtccatgaacagatgaaaggataaacaaaatgtggtctacacatacagtggaatactagccagccttaaaaagggagaagaccctatcgcatgctgcaacatggatgcacctgggggacttcacgctaagtgaaataagccagtcaccatagatcagatactgtgtgattcccccttacacaaggtatctagagtaattaaattcctagagacaggagtaggatggtgagacctaggggcttgagggagagagaaacagggatttgttttttaatggccgtagaatttcaattctgcaaaatgaaaaagttgtggagattggttgcacaacaatatgaatatacttaacactattgtgcacttaaaatgattaagacggtaaattttatgttgtgtgttttaccattttttaaaaatagctcttctgaaacatgcattgcctcatttaaatcttgctctaaattggtgaagtaggcttcttcattctcccatttcacagatgacaattctcctgcagagtgaggctagatgatttgttccagataagtcatttgacctttactctagggtcgtagggagccctggatgggtcttgagcaagacggtagcacaatctgatttacactttaacatagggattgacaaactttctgtaaaaggctagataataaatagttcaggttttgcagagtagaaggtctctgtcctaactactcaactcaatgtgtagatagtgcataaatgaataggcatgtctgtgctctgataaaatgttgtttacaaaatggatggctgggtttggcccaagaccataattcgccaacccctgctcatatggtttggctgtgtccccacccaaatctcatcttgaattgtactcccacaattcccatgtgtcatgggagggacctagtgggaggtaattgaatcacgggggtgggtctttcttttgctgttcttatgatggtgaataagtcccaggagatctgatggttttataaagaggagttccccagctgaagttatctcttgcctgcggccatgtaggacgtgcctttcaccttctaccatacttgtgaggtcttccccgccacatggaactgtgagtccattaaacctctttttctttgtaaattacccagtctcgggtatgactctatcaacagtgtgaaagactaatactcctgctttggagagctccctggctgctatcaccttccaactccagcatgtggagaagacagttccagaagataggctagttaactgcctcttccccacactgtatcccctaaaagtcaaccgtttcataacctgggagtaagagactcgtaaggaagcagcaagttcccaggggtgccccatcagttccaacgtcaatgctgcctcttgtcctccctctcctcattgttgcattgattgtgcaacccatctccagaactttttcgttttgcaaaactgaaattttatggccattaaaaaccaaatctccatgcactcacgcactcacactgaaagctcccaagaaggagggccctggcaaggtgacctggaggcccagcgaagccacggcagtgggccaggcatgaagaaactgtagtctctactcctgatgctggcttgacagcgctgtttgtttcaagactttattagcattgcagtgagggacctggagaatttagaggtgctgttgccattgctttctcagcctaaacctcaaagagcaattaacctggttatccaggcctccctctctccccttgtttattgccgtgaacacaggaactgcaccattaggtgcatgaaacgctatcaaggaatttaactgtaatttaaaaggctctatggggaggaccccagtggctgattaataatgcatttgtagagcaataaagactgcagcagatcagcggagctcagcctccagactttacttatgcgtctggaatcctatgaggtttctctccggggtggcagaggggtgtctacgccggagttctctggctccaaaaacatggaataggatcctgtgaaatgtggaatactggaaatggtcctgtccagatggtcaaggacatgggcttctaatcattggggttctagagttgaatcctgggtctaccaacagctatggaacattgagcacatcacctaaacctctgtgtgcctcatttttccccgtctctaaaatggggctaatgatagtatctatccaacaggttctcctaaatggaatgatgtgtaatacataataaagtacctggtgcttgtagagtaggtgcttgttcagtgctaattatcttattactatcctcatcattaaagaaagcattatttccttctggaaagctcaggccactgaggctggttcaggcttggtcccgaagagcttgaaaaaggttagttctcattctcacatttcaaccagcagcaagaccttccaattctacatcctgaatatcactgctgggtccatttctctctctgtctcttctgcaacatccctgtcacgtagattgtggcaatacattcctaacttacctgctcacatctgcgtctcatacccgctccctgcctctcccaagtgaatcttcattctgcatctagagtgtgcttcttaagatgtacttggaactgtgtggctcgtctgctgaagacttgccaaggactttccccattgcaagtcagtgagaccttcaggactcactgcagtctggcctacctccttcttcaaccttatctccctttattctcacccattctccctgttcctgcatcccctagagaaagcagactgtagctgaaggcttccccacatgctagtcttcctgtccatacccctgttctcatgcctctcccagcaattcatgcagttccttggatctgagtttaaacccagttatgctttctcaggcaaaacttttcttttatagcatttattccagtttattaatatgcatgtatttgtgtagtttgtttagcatcccttttccaaattaaactaaaagatccaggagggcaggttctaaatattttttttcactacttacaccacctggtactaagtagatacactggatggataaatggagggatgaatgagaagatgggtggatatatggaaagatgggttgagtggatgaaaacatggatgggatgagtcaattaatggatggataaaaagataagtgaattggacagacagatgaaaggatggatgaatggactggctgagcgagtgggtggttggtggatggatggatggacaggctgggtgggtggatggatggaaggacagacagactcggtgggtggatggatggatgggtggatggatgaatggatgaatggactaggaacatggatggatgggctgggcggatgagtggatggatgaatgggatgcatggatggatggatggatggatggatggatggactaggtgagtggatggatggatggactgggtggatgagtggatggatgaatgggatggatggatggatggatggatggatggatgaatagatggactgggtgggtggatggatggatgatggatggatggatggatgaatggactggatgagtagatggatggatggatcatggatggatggactgggtgggtgagtggatggatgaatgggatgaatggatggatagatggactgggtgagtggatggatggatgatggatggatggatggatgaatggactggatgagtggatggatggatggatcatggatggatggactgggtgggtgagtggatggatgaatgagatgaatggatggatggatggatgaatggatggatggatggatgaattacaggggtccaagtctgcaagtgaagagtccagtaagcatgcctttggggtagtctaggcaagaaatgacaataggttcaattaagaaagaggaaaagttggatttgaaaacaattcaggaggcaaatttggcagaatttggcagtctgttggctgtagagatgaggctggggaggaatcgaagaagacacctggattgttcattagaggacctgattggtgttgctatcactgactgaaatggagaaattactgcatctagaaaatgagcagatgactgccctacctcatatcatgagatatctcaccccattgtgagatcacgtaaactcctcgacttatttggaaaagttgatagaagtgggagaaactgaaaaggatggagtccagctccactggtgccgttgaaactgaaagaacagctttgcaaaagtcctaaagttgccacacacttggcatgactaagagccagaaggcggaagggatagctgaagtttaattagcaataagaagcatagatgctgaagacaaagaggagggcagggatctggtcatgcaggaccttgtaggccatgaaagggaatttagagttttcccttattggggtccgacagcatcacaaaacctgatttctctaagacaggggtcctgggtccaaagacagctgccagtctgcttttgtaaaaacactaccacgcccattcatttatgcatcatctgtggctactttccaacctcaagggcagagctgagtggttgcaacagaaactgtgcagctccaaaagcctaaactattaggttggtgcaaaagtagttgcacttttggccatcactttcaatagcaaaaaccgtaattacttttgcaccaacctaatatttacagtctaactctttacagaagaagtctgctgactcctgttctaagacaaaagctgaaaattccggcctgctatttcctgtgtgtatttgaacattttacagatttgccattgtcttcaaaaaggattaatgggaataaattacagatttaacaaggaataactgcaacttgtttctccagggtttcagttgacttttagggatggggtggatgaatggaaaggccaggggaaaaagtgctctgacttcagctcatgataaaaatcccccagcctgtgtgccaggtaccactgccctcaccgaaaggatgctaagtgaaggtggaatggcctgacatgtaccagatgctctacaaatgtttgctgaactgctaatgcatgaacaatgaccttcagagggatttggagccagccttacgcctggaccattttaatactgacttggaaataaggacagacacttaccagcctgctactgacttttacctgggctctcagctaacttgcttggaatggactgaacccccagtgtcacccaagtgacccgagaggaacccctgcattttgccagcagatggcatccagcaacaacatcccatggtctcccaggaagcagaactaggcccagatgaatattggagcatcctgtagaaacgctggtaagaaatgctgatgaatccgtctccggattctaattacaccgctgcgtctctcaggaaggaagagaccttttgccacaggcacacttcactaatctgaaacccaacacagactcagtttaattacatgtgcacttcctggagtcatgagaaaggttctgaaaaaccagttcactgcctgtcaggacgaagggcattgatcttaaacctccaaccagtatcttcaaccaagacacattgctgagtgtgggaaggcagaggagagggcaggagtcaccccaagggaggccaacttgtggggtgagaaaagtccatttggaaaaaaaaattaatagtttctctaatgtattttggaacttcttcctggaatgagaatggggaaaaaatactgaaaaacacagatctccttctggagcccttcaaataataataatgtaataattgggattgtaagttgaataccagtatttctactttatggacattaaagtttgagaagcaccaaacttcgtatattacacatccttagaatctttcatcttttaaatccccaaacaagactcacctcaacattgttctttacgttactttctgcgttgaacagccacctaaatgccaattatacctaaatcaagcccctcttcagaatttcagaatcctatactcaattgctaagtagatattatggattacattgtatcccccaaaataggttgaattcctaagccccaggacttgtgaatgtggccttatttggaaatagggtctttgcaaattatcaagttaaagtgaggtcattagagcgtgccctaatccaacatgactgtgtccgtataaaaagaggacgttcagacccacagatagacatgcacactagaagaatgccaagggaacatggacgtaaagacaggtgatgcatctcaaggccaaggaacatgaattaccggcaattccctaggagccagaagaaaggcatggaatagattcttccttctcagccctcagaagaaacgaaccctgccaacgcctggatcttggacctccagcctccggcactatgagacagtaagtttctgctgtttaagccccccagctgtgtgactttgttagggcagccccgggaaactacaatgggcatcaccagtccgatgtcccactgaggtcacagtcccacatcagtttttccacactgtcccctcaaccaagtccagccttttttttttttttgtactctccatttcagttgtgatactgacactccttagtccctctaacaaaaagtccatgtgtctttgattcctgatagccatttagactcgtaaaggaagaagaggtggtaagaccctacacatgctcactttcactcttagcatggagactaaagccagcaagatgccaggcccaggctagatgcttgaattttctgaattagttgctaataattaaaaatcagatgcttgtatttaaatttcaagatctccagcttccctcaagataaatggaaagatctagcaaccttaagccttcagggccacacatggccatgctgatctgttgatgaaaaaggcatctccagaccagcctgaccaatatggtgaaaccccgtctctactaaaaatacaaaaattagctgggtgtggtggcgcactcctgtagtcccagctactcgggaggctgaggcaggagaattgcttgaacccgggagatagaagttgcaatgagcagcagttgggccactgcaccccagcctgagctacagagcaagactctgtctcaataataataataataacaatgattaagtaatagagagtgatgtatgtgattaaaaggctagggatggttgcccttagaacctgggtttggactaaagctgttacttggaggacactcaaggtgcaaatttaccaacacgtcagattttctgtaaacagatgcaggcactaggcaaacgttttttaagccagaaagctatatcaagagagacacagtccttaaaggaactgcaaagaaagcatttgtcataattccccactcagtatcctgaatgcataatttctaccgtgactcagcgcgtctttggggactgagaaactaacagtccctttcgtgcatacaagaaatactgagaggcattgagacggggcccttcgagtttgcagtctgccactgcctctttccagctgtgtgacctttggccaggttagctgacctctctgaaccccatttgtaaatggggatactggtacgtccttttgcaggatgggtgggaggactggagagaagagctcacccagcaccatgctcagcacattcagcacatagtaggtctccaaaaaaaaaaaaaaaagatgataatgatgatgatttggctgttagtggttccaggccactttcaacacgtctcaacttgtgtatgacttgaacagctttgtctgacttgtgtgagataagggagcttttccctctgaaatctagaactacatttaatcaggcatcagtaacctccattcccaaactgaactggaacaagctacttttcacactaaaacaaagcgaggaataaaatagagcaagatgactctacttttttttttttcaggaagttttcccattttctcataatgagagatgattaaaataaccaggagacagatgacaccaaattaataaaaatgtagatcaaatgatcctccattacctattttgctcagttgcagttgaagaatgcattgattaaactgccgcagaccattatggtcgtattcattactatagcataatctgttttattatgataggataataactaacacagtcttgcagacagacgtttctctgtgggctaagtaatcatttactgtggatgtgcaccaaggaatgctgggttcactttgctcagggtagacttgaaccttagggttgcagagaagatggtttatttatttatttatttatttatttatttattttatcacatggctcagtttgctggattcccacatggggagggttcttcgagtgctgctgtgaaatgtataatgatcccagagagattttagaaatgccaaaaaaaaaaaaagagtagtcaatgagctgttagttttttgttgttgtttttatctactctctacccactagctgatttgattgatttcttatgtgcttatttacccattatttatttattaggtatttattcattattcattaggcaaacgggtgatagctgtgcagaacttagtatctcaagacttagcgttgatcagagcctcatcggaaaggcaaagatgtaactgaacagttaagcggggataaaggtaggcccagagatttgcaagagctgaaatggagggatgattttgccacttgggagtgaaacatctagagttggaagtggtgatgacttgggtgcagaaggcaggctttctgcaattgaatccaggctctgtcactcacaagctaggcattcttgggcaaatcacttcatccctccagtctaaggtttttcctctgcaaaatgggcgtggcagcagtacccgcctcactgttgacacaggtaccagttatgagaatcactccataagtgtgtcttaggtccggtcttcttgaatccttcagtatggaggagccatgtcattagcatcctttgcttggcccatgaggaaactaggacttagggagagcaagtaaccttgcctgaaatcacccagctacgcaaaatcagagccaagatgtgaagccaagtctgccgcacccccaagcacgtgcgcttaaccaggatgaagttggcatttcatacactggtggtatttatagcaagcgtcacaaaataccccaaggggccaggcaggatgtcaatgcctggagtaggcaggtagaagctgccactcacttagctccacgatagtgtaaagccccaggctcccttgccttgagaactgcaggcccaggcttgcttgctcactcttccaattattattctttttgtaagaaatctgagttttaatctgaaatctcttgatttaactgacaactattttaatttaaaacaaagcagcacaacagagtgtgagcccaagaaaagctgtctgcaggctgggcaggcccaggagctggcagcctgcaatctctgctttgaagcagggcgcgtctgcaggccgcttagtatgcgcagagccctgcaccacaccttcctacttaaatttctgctctgaggactcttgctcgcttccgcagtcagaagtctccatcactagcttgcagcgggaaaccaggctgcttcctttccaggccctccttttgctttgctcagcactggcatccatcactcactgttttcaagcaggatgggcagtgcctggcctgcaatgaaacttgtcttctggtgccacctcccattttctgagtgttttgaggctgggcatgagtttgccttgaggtctccttgaagccggcaggggatgcaaaattctcatcgagttgctttctgttgtcatttttcctgtggagttggggagaggcttgttggaaggttctggtgccccataatccaccctatttgatgtcaacatgcatttattaaacggcccctctttgtatgtggcaggtgaagggaaggtgccccctgaagagcagaggagacaagtcctgatagtgtatgtcagagagtgatatggtggaggcattaaaaaaatatgacacaaaagaggaagaattatgcccaaagggggcaatcagtgaaaacgtcgtagtctttgagataaataagtaggcgagtatataatttcaccaggtcaagaaggacagtccaaatagagagtacaataccaccatcaccaccgctgccaacattatcaccaacaccatgacgaaggccgccacctcatatcatcaccatcttcatcactaccaccattgccaacaccactatcacctctaccactgccgcccccatcagaatcaccatcaccaccaccttattatctctttcaccaccatcctgttatccccatcaccaccactgtcatcgccttcacagtcatcacagctatcaccatcacctccaccaccatcactgccaacaccaccgccatcttcatcatcatcaatcaatcaataatcaacattactgagaacataccataaagccctttgcaagttttatctaatttgagattcagaactttttgacatgggcaatatatatatatatatgtatatatatatatatatacacacacacacacacacacacacagacacagacacgcagacacagtcatgcactgtatgtttcagtgtttcagtcaacggtggactgcatatacaatggtggtcccataagagtataatatctattatagatatagatattataatcttattataatagattataataataattatatataatatattatatataatcaaatatgaaggtgtatatataatatatattatatattttatatatagtatatattgtataatatattatatataatcgattataatctattatctattatatattataatatatataattatcgattatatataataatagattattataataagattataatatcttacgggaccaccattgtatgtgcagtccatcgttgactattcagccctattataggggctgaaaaattcctatggactagttacattgtagtcataacatcatagtttatttttttataaattgagtgtggcctaagtgtacagtgtttataaagtctacagtaatgtacagtaatgtcctacaccttcatattcacccacgacttactgactcacccagagcaactaccagttctgcaagctccattcatgataagtatcttatataggtgtaccatttttatcttttataccatattgttactgtaccttttctatgtttagatatgcttagatgcacaaatacttaaaattgtgttaaagttgcctacagtattgagtacagtatgatgctgtccaggtttgtagcctaggagcatataacctaggtatgtgctaagccaccccatgtaggtttgtgtaactgcgctctgtgatagtctcacagcgacaaaatctcataacaatccactcctcggaatgtatcccatcgttgtgatgcatggctgtaccctcacttaaaggtaaggaaattgaggcttagagaaatgaaggcatttatgaaggtcacacagctcaactgatgtggctgcaaattccaagccagctacctgactccagagccaacactgttatccactgcaccccactgccccccactgcctgtggggagaaaggccctgtaggatgtgtgaagtgcttaggacactctagaacatggtaaatgctcaataaattgttagatactgcagcttacttcagaagaatgatagtgattattgcctaaacaaaggatttctgtattcaaatacattaggaaatggtggattaaacaaatgcaaagcaagtttttatttggctgcagaccttgtcagagcctttcaagggcaaatgcacattggaaatctccaagaagcaatgcgtgaactgtttccttctgaacacattcaagactagagttccttgagaggcacaagtcatgagataaatgatcaagagcatcaaagtgggattctgttagctcagggtttttcaactgtggtcctgttgacactttgggctggatcattctttattgtcaggtgctatcctgtgccccttggatgcctttggcctcgacttactaggtgccggtagtacagggtcacccagttgtggcaatgaaaaatgtctccagatattgataaatgtatctagggggctatatcacttccagttgagggccactgagttagcttatttaaagcatagagaagagaataggcctgaaatgcctacattgaagggaccggaggatgaaagaaaaggctatcacggagccaagggaagtgatgaaaggtgctcagatgaccttggaagggcaggaccagggctgccaaaagagcagggtattccaaaaagaggaggcggcctccagctgtcggaagctctggaagaaaaacggagaatggatgaagacaagcctttggattttctcatcagcttcctttggaaaacaactccagttgactgacagacagcaggcagatttcagggtgcagagcaggaccatctactgctcacggaaggcttagagtggccaatatcaggaaatgctgttaaaatggggacatcggaactagcccaggaaggatggaggccagcatagtggacaggcagcaatgcaagggagaaagtgaatcagtcaagcttcagacgaggaggtggacagggacaggatcaagagcatgatcctgtgatcatgggaaggacagttgggcacattcctctcgcagccctggtgggtttggctctttgttttagttccctacggccaccataacaaatcgcttcaaccagcgtggcttaaaacaacatgaatttattctctcgtcctggagaatgagagttctggaggtcagaagtccacactcaaggcatgagcagggttggttggttctagaggatctggagaagcatccatggctctctcctaggttccagttgctgctggcgttccttggtgtttcttggcttgtagatgcaccagtgcagtccctgcctctatcagcacgtgaccttcctgcatgtcttcacatggccttaggagaagatgagtcattggatttctagcccattctaacccagtatgaactcatcttaatttaactaattatatctgcagagactgtatttctaaataagatcacattctgagattctgagtggacatgattttggagggatgccgtttaacccagtacactcacatacagcttatttttttacaaatgtgaatttgtaaccattttaaaattgggataatgcccataagaataagtatttctggagtcttctggaaaaccagaagactgagcaacttggaatgcattccccatggtaaaatgattggcgctgagaatggatcacctctgttagggtgaatgggcttgttctaatttgcctctgcccccacctggcctacttctctcattgaccttacatgggtagcccagtgtggcctggaatttgagatcccagcataagccataaggctggggcctagcccagcacttggagtagactccatactctctagtttcctcgtggtctgatagagatcagaggcatcacctcctctcagatgttgtttgtgatctaggtgtaactacagtcacattcatccggtccacataagcccacagctggggtcacatgcacaaggaggatggaggcaaaccagccctcacatggacatgcgggccaggactggcccgggctacagttcaggaggccttttgcacattttttgcacgtcagttctggaatctcacctcagaagggcatggtgccagaggcgaatgacactaacttgagaaaccaaacagatctgtacaaaaaatacaaaaattagccgggcttggtggcactcattggtaatcccagctacttgggaggctgaggcaggagaattgcttgagcctgggaggtggaggctgcagtgagccgagattgtgccactgcactccagcctgggcaaaagagtgagactgtgtctcaaaaaataaaaataaaaggaaatcaaacagatctggatttgaatcccagctgtaactctagctgtgtggcctgagacaaatgccttaatctctctgagtcacagttttctcatccttagaatgaggatacaatctactctgcccaagggtgttttgggccaggtgtgtaaaatgccaggtatgaagtgggccctcagtaagtagcaatcatgtaaaaatgattgttgttcctattgtcagatgagttccagccaccagacagacagttgtcacacacaggtccggaggagcaaaatggatggagagaaggggagatgaagctgcctccaatcagaagccttctccaatcacaagcctccaccgatcagaagcctcctccaatcacaagcctcctccaatcacaagcctcgctgatgaggacatggagcttctaagtcccctattggctgcttgagacaggacatattctcaacagcagtcacctcctcccctcagcccccaaccccatcaccgttctgtgcccattttgtatgcaccactcagtgtttaggtgacaccttattaaacaaggtttgcctgtgaccaggcaagtcacaatgaagtcaggaattaagatatagcttcctgcatcacctaattggattacaaggatcatatgaatgctgtgttgactatgaaatgtgcaggggattattcagtaatgactttcttctgtcgtccttcactaatcctgtcaatcgggaatgcctttagattaggaaagaatcccactggaaggagctgtctttctcatttacagttgggcttccccaggggctggagaagcagggtcactgtagctcacttattggccagtgaagacagccgccatatctaagcaatgactctattcctcatcactggtctgggttcctgatccaaacctacaacagtcaatggacatttctaccttggggttccacgagctaagggtctgaaaaataacctaccatccttctgcctccaaaatctcctgaacttttttcctaggtgaataaccctgttattccccaagttgcccaaaccaaaaatccaagagtctctgttatttctactcccttaaatccacaaagtcgctatcatttctaggtcctaaataccttgtatctgtctcctcctccccagcctcctgctctgccctttaggcatgtattgtctctgtctggtagtattacagtcacttcccaactctttctcctgctccatttctgcctctgtcttctcttcaaaaacaaaaacaaaaaaacatggcttccagagtgagctttaaaaaatgtgcttctcctcacatcactcccctgatgaaaaccctcatcaaacaaggaaatacattgcagcttgagcctcttctaccttcctgggccaaagcagacattgctaatcaatcactgcattgcgtcctgcaaggcaggatttggactcagctttgctatgagttcattgggttgacaagagagatgagaactatttgacatctcaggatccttcctcatctgccctctgcctgccagccttgttcctgctgctcctcctcccttacctgcattgtagaattcacctcccagccgtcctgagctcaggggagttctgagtgactcataccaccatacctttgcacatgcagttgcctctgtgtggaatgcccttccccaagtgtgtctgcctggaaaacttttactttactcaggtgccatcctgtccatgaagtctcgagatttaggtatttttctccaagcccccattgccccatgaccaggtgttcattttagggagcacccccttgcactgacgttgttggttagcatgtctgagacagagataaggcttatgcgtcttcacacccctggtacctgccatggctccactgtgctcaggagctgtttgtaaacaatcaaatgggtgatggaataaatagcatctgtcttactgaatgcttgctttatgccagacaccaggctaagcgctctatctgcatcattgtatcccagcctcacaatctctctgtaaggtaggcatgggagtttttttgcacatgtggaaactgaggctcaaagcaatgaagtcatttgctcaaggccacacagtgatggacccaggtctatctaaagtagtatttttttttccagggacatttggcaatatctggaaacttcgtttttattttttgagacagggtttcactctgtcatccaggctggagtacagtggtgtgatctcggctcactgcaatctctgcctcctgggctcaagccatcctcccacctcagcctcctgagtagctggcactaccaccaccaccacacctggctaatttttgtattttagtagagacagggtttcgccacgttggccaggcttgtctcaaacacctgacctcaggtgatctgcccgcctcagcctcccaaagtgctgggattacaggtgtgagccactgtgcctgctggaaacatttttaatggtcacaactaaagaaaggatgctcctggcatttagtggatcgagtccagagatgctcctgggcactgcacaatgcacaggacagcttgctgtcacctccaatagagagttatccagcccatagtgctagtagtgctatagtacaagggtactacggccctgaggctttgaatgtaacggtggccttgaatgtccctacggtatgtggctctgtaactgctgctggtgtttcattggtttcagttgctcagagtcacaagctgcacaaatacattcagaaggtgctgccttccctttggttgtgtcaagaatggcagagagaatagggacataggtccagatatgccttctactaaatcttgggacttcatcatttaaccataacagcctccaaggataatagttctcagtgtaagccgtctcccccattctgtccatcctggaggggtccccttcaaacccactacctcatgcaaatttccagcagctgaaatgaatacatgcagatttttttttataattttttgcagatgttcttaggggtaaggtaaatatgtaatttacaaaaatccaaagaacttatgatccgaatctgcttaagccacatgaagtcaacagagggttaaaagcacccaatttattttcatcaagaaatttgaactttggtcgtagaatgcaacttagctgcgattctacattatttatgattcatggggcattgtaacttaccacagtctctgagtaatctttttaagcctgccaaaagaaccggtgttaattgcttacactggaacatatttgctgttggaaatgtcacaccataattatattccatttcgctgtctaacaagtaatatactaaaagaaaattgggttttttttttttcctccttcttcttgtgatgtgcaaaaccattcctgaaacgcttcaagcagctcgcaggtggcaagtttctggacttgtcaagaaattaggcagaaaactttctgggtttgctgatggtaatacaagccagaccagcagggtctgcttggtggactttgtaacctgagctcatgctcagaaagccccatgttagattttatgctttgctttcaccgtcttgacactcttaatattttttgaacaaggggccttgcattttcatctgtagtgagccctgcaaattatggagttggtcctaaaaaggaggaggaaagggagagggacatggcccatggagactgggattaaagatcaggaaacagttgacgtttcagaacatgatgagaatttcagagacacagaccaattataaatagagagagagagagtgtgtgtgtgtgtgtgtgtgtgtgtaaaataagaattggtggcttacgaggtcacacaggacaaaatgtctaatcagatgactcttcctggaagactaatactatatttggtaggctgagcatctgttaaaccagggactggcaaatgatagcccacaagccaaatccggcccaccacctgttgcgtaagttaagttttattggaacacagccacactcatttgttttggtcttgtctgtggctgccttctctctacagtggcagagttgagaagttgcaacagagaaccatatggcccacaaagcccaaagtgtttactgtctgtcctcttatagaaaataaaatatttaagattcctgtcttaaaatctagggagagcctcatgcacctcgctacaagagaggctgagaagtgttgaagaaatgttgataagtgtcacattctcatttgtaattgtgtataacagaggggaaaatggatgttgatggatggttagctgtctctggcataccccttttgcagatttggaagctgaggaggcttcaagagttcatgaagccatttgcccaagaccacagatcaaataagtgacagagccaggacgcagagggaagcctgacttgaaagtataaagcacgtgctttctaaattgtgatagcttccctgcatctgctaacaagtgcacgtacactgagtaatcttttgcacagatacactgataagactgcgaaataagactgtgaaagaaaacaagccaaatcacagatggctcttgcccccaaagggtgattaggcatgcacgtgcctggtcttcatagaaggcagatgctgctaaaagtgttcgttgggtcattcatttgttcatgtaagaaatgtatggaaagtttaggctttgtaaatggttcaccttcacccatctcaatgccttgcttttcctcctgtccgtcttgtcgctgatagaatgtggtcaacaatcagaacatctgtacaacagctcctagatgaccaatataccacagccttcaattaaaatatgtcaggttaccttcttcagtatttcctttccattttccactttgggaaattgaagctcaaaggttctggtagcttctctagataacagagctagcgaggtctggtcctagaatttgaacccaagcctttctgccttcagtaaccaggtatagaatcactatattagttagggaacatcagctgctataacaatcaaacgtagcaatgtttgtttgcgttgaggtcacacagggcaaactgtctaatcagataactctttctggaagactagtactttatttggtagatagagcttctcttcaaccagagatgggtaaactgtagccagtgggctgaatccagcccaccacctgttttgtaagtcaaattttattggaacacagccaccagtgtataatgtctctaacatgaagatggttgatgtcttcatcctctgccatccaaaatagatgttcctgattgactcccctccatgttgtaattcagggatccaggccctttccatctgactccactatctccactatcttcaacacacagcatccaaggtcaccgtgctcttctgcacccagacagtgaagagggaaatagcacagagaagcatgcacaggtgtccatgggtaagcctagaagttgtgtgcatcacatttctattttattggctaaagcacagcctcttggcaagacctgactgcaaacgatgtgaagtaggttgtagtgagtgccatgaataaagcagacgtggttttgaccaagagcctcaaccactctgattgccctactgctctgcccagagttgcttccctttcctttgggttatttccagccccctggcccctgtgaaatacatgtgaccacgtggctctgttcctgcaaaagggtcagcttccccaatgctgggaacacatctccaggaagcattcctctgtgagtgcgactgtgcatctgacagggatacggggcacagcgggaggcaaggttagtaatttagttgttactggctgacaggttagtcttagaatatgttccctgcaattcaaggcttgcacgaaagagacagagagaggcacttaacaaatgtcagcctttcttttttttttttttttcctggcgcagttgcctcacactgaccctgaagcatttgaggggtgtctctgtgtgagttcatcagcgcctagtcccagcccccgcttggtgttcttgattcctctttcctgtgaggtttccctgagtgtggttcacgaagagcggccgtcacagttgccagagggcccctgaaaatactgaaatactgccagggtggtgatctggagggaggaatgcaggattctttttttttttttttttttttgagacagagttttgctctgtcacccaggctggagtgctgtggcacgatcccggctcgctgcaatctctgcctcccgggttcaattgattctcatgcctcagcctcccaagtagctgggattatgggtgtacaccactgtgcccatctaatttttatatttttagtagagatggggtttcgtcattttggccaggctgatcttgaactcgtgacgtcaagtgatccacccgcctccacctcccaaagtgctgggattacaggcgtaagccactgcgcccggtctagattctgcattttaataagctcctcagacaatctttttcaggatcacgggtttcaagcagtttctcaaccttggcatttgacattttgaaccagataatcccttctgtgggggccgtcccgtacatggtgggacgtttagcggtatccctggcttctacctcctaggtgccagtagcattctttcttccagttgtgacaaataaaaatgtctccagacattgctagatgtcctcagggagacaaaattgtccctggtcaagaagtgctggcttagggcataacttagtatgtttctgtgacataaaatataaatgttcctctaggacccatgttcttctctccattactaactcccaggtatctgggtcgggtcctaggattcagtctccctcagaggaacgtgagtggaaatgatggttacttcttggccaagccagttgacgggctgtgaatttgtcatgccaatcgctgtcctctctgtgcactgcaagagaagggtgctaaggagtgggattgtgtagttgaagcaatttggatcctcaagtcacctcttggaggacggccctgtaggagagctgctcaagctgcataggagcaggaaataagcctttgttgggttcaagccactgcgattttgggatccatgtgttgagcccagcattgccctggctcatactggattttagtgctctatgtaaagcacaaaggaactgtcaacttcctctcttataagtcatctgaaacctgttctttttattttttcttggagacaaggtctcactctgttgcccaggttagagtacagtggcgtgatcatagctcactgcagccttaacctcccaggctcaagcgatcctcctgcctcagcctcccgaagagctgggactacaggtgcaccccaccacactctgcttaaaacatattcttaatacatttaaggcaggttggagtaatggctttggaagcaggttagtctgggttcagatcccagcttggccactagctgtgtgatcttggttatgctatataacctcttgagtctcaacctgttcttccttggcaaaagtgggataatgatggcatctgtctcagtgttttgagacgatgaactggaaaaattgccaccaaccaaccaaccaaccgaaaacactcttgataccatgcccggcatatagtaagtgcttaaaaaaatgctggcttttgtcaatatatttctggcagggtcagtgtgtatgcattgtttctggggttagcatttttagtagagacctgttttttgccaatcagtcagcttcccgtagctttattgactataggacatggttctgtgaatattgaaaaggagtgatggctgccggagagggacgaggaccccaaacaatatgttaggaggtgatgattattaacaagaggcaaggaaatgttgttgccaccatgaagccgtaagggtggaaaacatggccaaggagtgtctggatcactcactcattctgcatttattgccctagtgcctattttgtgccaagggacagagataaaacagaaagccaatctttccacattttcatgtacctccaatactacacaatctgttgcttttaagaaaaggacataaacaagcaaaggcgcactttctgcccagggtgagatctcagtcatagttggagagacaagcaaatgattttatctgcccaggcaaacaagcccaggaagagcatcagaagttaacacaggccgaacgtggtggctcacacctgttatcccaacactttgagaggccgaggcgggtgaatcacctgagatcaggagtttgagaccagcctggccaacatggtgaaatcccatctctactaaagatataaaaagtagccgagtgtggtggcacacacctgtaatcccagctactcgggaggctgaggcaggagaatcgcttgaacccaggaggcaggggttgcagtgagccgagattgcggcattgcactccagcctgggggacagagtgggactacgtctcaaaaacaaaaacaaaaagttaacacagacattgacctgagttccccaaatttatccagactgcctccaatcccggctacccactgcttctctcaagtgtgttatatgagaacgcctaggtggcctggcctgggtgacagcttgctcagatttcaattgtgctcatattttttttttaaatggcagtttcaacaaatcctacccactgatgcattgtttaaccaaatgtcatttctctgcctttctcatttaagtatcatctgttaggtttacacattggtacacccatgaaattaacattacatgtgtttccttttggagctgactaaatttaatttaatttaaattgttttcactgtcagtggccttcccaagctgtggtagcacacgttctgtctccttaaaggcttatcttaactgcatcctgtcaaaaaatcctaggacccacccactttcccctgcagttctctggtctaggggccagctcatgtttaaaatgagcttcctctgtcagttcattcagagaggttcttatttagaaaagtttattctcctgcctcagcctcccaagtagctgggactacaggcatgcaccaccacgccctgctaatttttttgtatttctagtagagacggagtttcaccatgttgatcaggctggtctcgaactcctgacctcaaatgatccacccgcctcggcctcccaaaatgctggaattacaggcgtgagccactgcacaggagaatcacttgaacccagaggcagaggttgcagtgagccaagatcgcaccactgcactccagcctgggtgacagagtgagactccatctcaaaaagagaaagaaagaaaagaaaagtattctcaggagccccctggcttaaatgaagtttccaagccatcgttgagaaatcagggtctctctggtcttccaggtaggtcgaagagtgacctgcctggagctctcaaaccaatgttagggaacttgactcgattaatacaagcaccaagacagcataatggttatcccctcaatgatgctgtaatggtaaaagacaagacgtagcgttcattcatttcacatttatttagagattcgcctatcatgtccatctggtccagtgtgcagccctgcagtgtgtcacccagtagcaggcatttgataattatttctctttttttttctttttctttttttttttttttttttgagacaaagtcttgcttagtcgcccaggctggagcacagtggcacgacctcagcacactgcagcctccacctcctggttcaagcaattcttgtgcctcagcctcctcagtagctgggattataggcatgtgccaccacgcccagctaatttttgtatttttagtagatacagggttttaccatgttggccaggatggtcttgaactcttgacctcaggtgatccacccaccttggcctccaaaagtgctgggattacaggcatgagccaccatgccctgccgataattatttctcaaataagtgataagtccatcctgtccactgctgtcttccccctccacctcacaccctgccccctgccactgccccagggtatagcacactcacaggcatttataattattcatcaaatgaacaaatgactttgtgctggcacatgcttgggaggtatttcaaagtttttacagtgatctcaggctgtgcccgtggaggatcttctagtcactcccaggaagaaacatgacaaagagaccttacatgttgtaggagagaaattgaatgagcttggaatatgcaggtggcttagatttggagggagatgggggccggagtaatagcaaaataacaatttccacatatttgagaggttggtttgccagagaagcagcagcactatctttgaagaccaaattaggacctatggatgaaagcttcgagcaggcacattttggaagcgatagctcacaatcactgctgagcacaagccctgctatgtaaggcactgagccttccatctttggaggcatctaagaaaaaatacccagtggccctgaattacttactcagtaagttcttgtcattaccctacagaagtcttaaaaatacagaaaagcaccaaaggaaagtaaaaaaaaaaaacaaaagtccgcactactcccctctccccacccctgagtttgctttttcgctttgttttgttgttcttgttgttgttgtttgtttttttggtgttttgccttttcttgagaggaagcctcactctgtcactaggctggagcgcagtggtgtgattttggctcactgcaacctccaccccctgggttcaagcagatctcctgcctcagcctcccgagtagctgaaactacaggcgcgcaccaccatgcctggctaatttttgtatttttagtagagatgaggtttcaccatgttggccaggctggtctcgaacacctgaccttgtgatccacctctcaaagtgctgggattacaggcgtgaaccgctgcgcctggacccccaacgttttttgtcttttttttttttattattattattattcaaaataagaccctccctgccttgagaccttgacacatggtcttccttccttccaaagtgacatcctttcacctggctcactctttatgtttcacagctcagcttcaccgtggcttctttggaaaggtctatagacctggtttgcatcagatcacctggccccatctctctcctcccctggccgcccgtacttttcattcattgcatccaacaccttttgtaaaatacgttgatctgttttctccatccaacatccactggactgtcagctccttgaatacagattcaacactggttttgttcatttgggcattctcagtgcctggcagcgtagctgctctgtgaacatttgagaagggaaggaggagggtgggaggaaggaaagagagaatgcctgtattcactgacagtgaaaagatgtcaggagtacattactgaaaacagaatgcatatgacaaagcagaacatacatgattatatataacgtgagtgcataaaactatttgcaaaatgttcactgaacgtttgttaacaatggtgatattttggcactaatatctggggttttttttacttcatattgttctgtatgcttgaattttctacagtaagtattatctttgtagacagagaaatccaagaaacaatcagaagcacctaagaagtgaagctagaacagagttcgaaacgaggtcctccttggttttctcccaggaactgcagctccccaagtggtgtggtctccttgtctgtgtatcagagccccggcctgaggctgagcccagctcacatcattgcagggagagggatctattgagatcccagtgcatttgaggtgctcgttgttacccactgttgtgaaccctgttgcatgtgtgtttctatgtccatttattcaacaggaatttactgtatgttccaagtgctcctggcattgtcaccagacactctcctaggccaagtaaatgaaacaccatccctgccctctaggagcaaaaccaaatgttgtgttgactattgctgctcgttgctgttgtgatcaaccggagatttcattagcagtaggcttgacgaagaggaccactgtgcttagagatgtagtccttatatttcaagaggcaggatgacagagtatcctggaatcagtttgcttggactcacatcctagctccattacttgctagcatttgatcatgggcagattacactctttctgtctgcctcagtttccccatgtgtaaaatgagaatgatagcaggacctcataggtttgctgcaagaactcaatgagatgatatgtgtacagggcttggccgagtgaccagcgcaaagtaaatcctacccacatgagcttttataattattcctgtctgcattatgtgacgtgacagcattaatgtgacaaatgggaaacgatttggagaaatgtcccttttttaaaagaaggcacctgcagaacatatttatggtttatgatcaggaggcagcgttaatggcccataatgtgattactatgaggatttttattaggaaaattccaaccaatttggcattaattaatgtactgttaactttagagtgttactcacttaatccttggagagttggagaaaataaacctgttgtcaaaacccttcctctgagaagtaaataagagttgttccctcctcgagaggctccctttgtaataaaaatagatgagtcgctgcgtttttccatggcagtatttattgagcctgcgagtcccttcaagagaggagaaacgagggcagagatgaaaatgtcaagcgacaggaaggctcgtaggagaacttgcacacagcagcctctgggtcaagagggcagggagtacagatagagcaggctttctggacacacgaagcacagagtgcaggatatgggggcccctgcctgtctttccaccccatgaagcaaggcatcccacaccaccccatctgggaatttcaaaatgtgtcctgcctgccacccactcctcaaccatggataacaagcctgatgaaagggcttgttactctcttcaattgcagtccttaaggtggtacccaagaccctgtgtgatgcctctgctgtcggcccatcctcatcttctgcacttcctcttggcctcagttccagccacactggccttcctgtatgtcttctccttaccatactatcattcgtgacaggccctttgcatatgctgttccctccacttagggacacttttccctcttctcttacctagttaactcctcactcaacctgtcaattgtagtctaaggggcacatccctggcctccttgagttgtatattagtctgcctgggctatcatttaaaaaaaattaccatagaccaggtggcttaaaaaacaaatatttgtctccattttggaagctatgaatctgagatcagggtgccagcatggttgggttctagtgagggccctcttcctggcttgcagatggccgacttctcactgtgacctcatgtggcagagaaatagcaagctctccagtgtctcttctaagagcaaaaatcccctaaattcaaggctccacccttaggacttcatttaacctttttgtttgtttgtttatttcagaggcagtcttgttttgccacccgtgctggagtgcagtggtgcaacgtctgcctcctgggttcaagtgattctcctgcctcagcctcctgagtagctgggattacaggtgcctaccaccatgcctggctaatttttgtatttttaatagagacaaggttttaccatattggccaggctggtcttcaactcctgacttcaagtgacccacccacttcggcctcccaaagtgctgggattacaggcatgagccgccacactcggcccaacttcatttaactttaatcacctccttaaaggccacatctccaatacggtcacaggaggggctaggccttcaacatattaattttcgggggacacgattcagtcctagcaaatcctgtctttggaaaaggaaaggatacctcagcatcgagaaacagaagcagaggtttcgtgagattaaacaacattttggcttcacagaaagggtgattggaggagcatagagggaaatgaggttggaaggaggagaagagaaaatgtagtcatttgcaaatcattatttaaggcaacaataatgatggccaccatttcattttctgcataccacatactggtcctggagatatttatgtgtttattatctgtcttctttctcaggagaggctgcttctcataagcaaaagctcttgtggcgtgtgcatgagtctatttttcactcccagaatggtgcctgcctggcatatcatagacattcgttccagttacttctgctgggtagcaaacccccccaaacttagtggcgtaaaacaccatcacttgttatgctcttggattctatggatcaggagtttggaaagagcacataggagacaggggaaagacataatgccccaggttcagagctactgctctgtactaggcacttctctgagcataattccatccatcagttcctccctatgaaggagggtcaatatgtatccctattttactgatgatgagctagaatctttgagaggttatatagcttgcccgacctcccagagttaatgggggaagagccatggtttgaatgcagatctgtccgatttcaaaacgaaacttctttccactctgctatgtagcctttccagagtggctacctgtgtttgccaaaaagtgggaggccatcttggcaggaagccttctgcctcccagggagatgagtggttctcaaaccatgctggtcccctagggggcactgggaaatgcaagtgaggagaggctgttatggggactagggatttcaaatgccctgtaatcatgggataataccactcaaagaattgtctcttcccaagtgacagtagtccctgttgagaaatactgcttgagaagggaggaggatctgtgaaatattgatctgtgctgaaaccctctgaaaggttgctcaaatggctaggtgcggcagatcatgcctgtaatcccagcactttgggaggctgaggcgggcgaatcacaaggtcaggggttcaagaccagcctggccaacatagtgaaaactgtctctactaaaaatacaaaaaattagccgggcatgggggtgggcacctgtaatcccaggtactcgggaggctgagacaggagaatcgcttgaacccaggaggcggaggttgcagtgagcagagacctcactactgcactccagcctgggcgacagtgcgagactcagtctcaaaaaaaaaagaaaagaaaagaaaggttgttccaatacaatagaagctcaggggttaaaagtccccattttagtgtctgacagatggagggttgaatcccagttctgcagcatattagctgaccaggtcaggtaactactcagagtctttatttccttatctgtaaaatgggaatagtcagaatgcctccctcaaaggtctgctgtgaggagtaaatgaggtaaggtcttgtattggttcattctcccattgctataaagaaatacctgagtggataatttataaagaaaggagttttaattggctctcagttctgtgagctgtacaggaaacatcaaggcttctgcttctgaggaggccccaggaaacttacaattgtggtggaaggtaaagggggatgtaggtatgtcttacagggccggaacaagagcaagacaggggaggtgccacacacttttaaacacgcagatctctagagaacagcatcaaaggaatggtgctaaaccattcatgaaggatccacccccatgatccagtcacctcccaccaggtcccacctccaacactgtgggttaccattcaacatgagatttggttggggacacagatccaaaccatatcaagtctgttagaaaatgctcagcccaggacctggcacacagtggccacattgctattatcataatagctctttcatccttgatgcacagaaaaggtaacatcagcaggatggataagagcttgcaggccacagcgcagcgttttcacagatgatatgttacaggccaagtgactgggacccagtgaattgcagtgaaatgtaccatacaccatcaatatctatcccaccagtttccatttattgagcagtatatcattagaatatcccagggctctgaacaataaaatcaataagacggttcagtcatgggctgttctttaataactccagacttgaatggggtcgggggaagtcagtgagcaggaaaatgtcctgagtgcttggtcgggggtggagggagacattttctcagagtgggagaaaaataatgaatgaggtagccttcagtctctggtggagtgagtggccatgagcatttgaggcaacagccaaagatatgtttgggtaaaattctttccacctcgagagatgcgttttttaaaagatggttgaaaagaaaagaaaaggtgtccaaaatgtggttctcaaccctgactgcatgtcagaatcacagggggagtttcaaaagagtcccaatacttgcgcccaccaaactaattaaattagaatttattggggtggggccgaggcatgaagatgtttttctaaaaaaaagatgttcagatgattttaaatgtgcagccagggttaagaaccactggcctaggcaaacatgagcctgtatcacaatcacctggagagcttcttacaacacagagtccttgtctcccacacccagagtttctgattcagaaggtttggggttggggctgaaacttacattgctaacaaattcccaggtgttgctgatgctgctcatcagagaccacatctagagagcttgtcctagaacagtggttctcaactgggagcaaattttgcctctccacgccctatcccccaccagggggacacacatcaatgaatggagacattttaggttttgtcacaactaggtgagtgctactggcacctagtgggtagatccagcgatgctgctaaacatcctacagtgcgcaggacagtcccctccacaacaaggaattatctggcctcaaatatcaatagtgccaaggttgagaaatcttgctctaggggagacgatagttttgaagccattctgagaacatgaggctttggttcccatcaagcttagcatgggagcctgagtgaagatgaggatgccagattcttgctagccaaagcctggtcatagagcatggtatttgacgtcagaacagtgcgtatcctaatttcttctccacctcttggctctgtgaccttgggcaagttcctcaccctctctgagcctgggatgattatctataaatggggataattttcatttgcagcattgttacaagaggtaaaagcctgatgagtgaaagaaccacatgaatgttaagtactcaacaaattagagtaagaatcaaaaggacagtgtttctccacagacttctgtctctctagcagggaggtgctgtcccaaaagcccaccccaggagactcctgacaaaccctcctgggcccctaaagcaagtgggagccctcatccagaaagatcaaaacattgtctggacctttgggtccttgcaggatggatggggctgcttgagtatccccctgccctttgcctttacctcctctcatttgtttaacaaactcagcacatcctagtttggaagcaaagctcatggagcctaattaacattccccaagcttccttcgcatccctccagccttcacaattctgccatatccacattccacctgccatattattcttgtagtatttttactgcaatagactcgcctttatttttatgtaagcacattttattttaaaagtaattttgcatcatggccataagtggaaatcttgctgtcacttgccatgaggagacagcaacaatgcgaagaaatcagtgaaacaaaaacaatggcattcagtgctagccgggcactcctgttacctgctggagatgccagttctgggggcaggattctgctttttggaaaaggaagttcagtaggggagtgctgctgaagatttgtttgcattgacctgagagtttgctggtagggtattcaggagaggtgggtaagaattgaaaaaagattcacagtcccccctgactcaatgccattcgatgtgagcagcatgtgaatcctctcttgggtaactctgacatcgcatttaagaacacactgggcaaggtggctcacacctgtaatcccagcactgggaggctgaagggggaagatcacttgagcccaggagttcaagaccaacctgggcaacatagggagaccttatctctacaaataattttttttttaagatggagtctcattttgtcacccaggctggagtgcaatggtgtgatcttggctcactgcaacctccgcctcctgggttcaagcaattctcctgcctcagcctcctgagtagctgggattataggcgtgcaccaccatgcccagctcatttttgcatttttagtagagacagggtttcaccatattggtcaggctggtctcaaactcttgaccttgttatccacctgcttttgcatttttagtagaaacggggtttcaccatgttggtcaggctggtctcaaactcttgaccttgtgatccacccacctcagcctcccaaagtgctgggattacaggcgtgagccaccacagccagnnnnnnnnnnnnnnnnnnnnnnnnnnnnnnnnnnnnnnnnnnnnnnnnnnnnnnnnnnnnnnnnnnnnnnnnnnnnnnnnnnnnnnnnnnnnnncagcatagggagacctggtctctacaaatatatatttaattagccaggtgtggtgttcatgcctctagtcccagctactcagcaggctaaggtaggaggatctcttgagcctggagtttgagactgcagtgagccatgatcacaccactgcactccagcctgggcaacagagcgagatcccgtcttacgaatttaaaaaagacaaaaacaaaaccacaatcgctatagtcctcaggatcaggtccctgttaaacactctccagccatgtgattagttacaagttcaagtgtgatgggcgaggtccgcggagtcacaccacatgaactcctccacaatcaggctgtatggctttattttgcctcatttatagctgtgcttacagcatcacttagaggtgagttctctttgacagatgaggaaactgaggcatgagaggcaaagtgacctcctaataaatggtagggctgggatgcagacccaggctaaccccttctgtggaatagctgagttaggaagtgcaggatgggctcctaaaaataaaacattacaaatagtgactttatgatccaccaattccatttctgggaatatactccaaagaattgaaacagtgactcaaacaggtacttgtaacccatgttcagagcaacattattcataacagccaaaaggtgaaagccattcaagggtccattgacagatgagtggatcaattgtgctatatgcatacagtggagtattacttgccctgaaaaaggaatgaaattctgacataggctacgacgtggacaaaccaggagggcactgcgccaagtgaaaggatccagacacaaaaggaagaataatgtctgatgtcacttacatgaggttccttatcaaattcatagaggcagaaagtagaatgaagctttccaggagctgaaggaggggagagtgggaagttattgttcaatggatagaaagtttcagttttgcaagatgaaaagagttctggagatggatggtgataatagttgcacaacagtgtaagtatatttattatactaaactgtaaacttaaaaatgcttaaaataggccagatgtgtctcatgcctgtaatcccagcactttgggaggccaaggtgggctgatcacctgcggtcaagagtttgagaccagcctggccaacatggcaaaaccccatctctactaaaaatacaaaaaaattagccgggcgtggtggtgggcacctgtagtctcagctcctcaggaggctgaggcaggagaatcgcttgaacccgggaggtggaggttgcagtgagccgagattgtgccacagcactccagcctgggtgacagtgagattccatctcgaaccaaaaaaggctaaaatagtaaattatatgttatccatgtagagcatccttaattcaaaaatccaaaatctgaagtactccgaaatccagaacattttgggcacataatgctacaagcggaaaattctatacataaatgcttaatgcaactttgattaatgcacacaattatttaaaatattgtataaaattactttcaggctatgtgtataaagtgtatatgaaacagaaatggattttgtgtttaggcttgggtcccttccccaaaatatctcattacatatacacagatacttcaaaatctgaaaaaattcaaaattggaaacacttctggttccaggcatttcacataagggatactcagcatgtattatcttggactacaacttttttttttttttaaagagaagtgcaggatgttcagaggggctgtgacagggaactcaaagaagggatgggggccaggcacagtagctcacacctataacaccagcactttgggagtctaaggaagggaggattgcttgagcccaggagtttgagaccagcctggacagcatagcaaggcactgtctctaccaaacatttcaaaattagcccacatggtggtggtcacctatagtcccagctacttgggaggctgaggtgtgaggatcccttgagcccagaaatttgaggtggcagtgacctatgatcatgccactgcactccagcctgggttacaaagcaagactcaatctctgaaaaagaaaaagaaaaaaaagtcattaaaaatattttttaaatgaagggatggggaagagagtcagggagggcttcccaaggaagggtcatttctcctgagacctgacaggtgctggcttggccaccttcatccttggacctatgttctttcagctcccctctgtggaccccatgacccccagttcacatcccctccacccctctcttctcattaagctgggtgggaggggacctggtggccccgcatgagcagcagctgcggtgcagagcagtctgggccgttgactgattcctcccagcggggcttggtgctgctgagcaagggtccacagaccacccaaaagcctcaaggaaaagtgggggtgcctagcctccatccagtttgctggatgagaggagacagccatgggcaacctctcaggcctgagtcttcaactttgccccctcatccccaccaccgggaccctgtatgtggatgaagctgtctggctaaatctgtcagtcagaaatcattcattgaggcctctcccccaaacttagctctgtaccaggtccaggggcaaggctggcatcctacaagagataagagcatgaccttggctcatagggaacgaactgacaggtatcaagagaaccaacctgggctaggcgctgtggctcacgcctgtaatcccagcactatgggaggctgagacagttagatcacctaaggtcaggagttcgagaccaacccagccaacacggtgaaaccctgtctctatcaaaaatacaaaaaatttagccaggcgtggtggcaggtgcctataatcccagctactcaggaggctgaggcagaagaattgcttgaacctgggaggcagatgttgcagtgagccaagattgcaccattgcactccagcctaggtgacaagagtgaaactctgtctcaaaaaaaaaaaaaaaaaaaaaagaaagaaaagaaaaccaacctgactctcaagggagtacagttctctatgtggcaatgctaactcctggatcgggttagaattccagatgattcagaaatttccagaaatatccagaaatttcatctccctcatttgggtttttccaaaataggggttttggagtctggcacacccaagtggtggtttccattctcgcaccaactgctaacatggcacctgcctcctgagaccttgggacaattaaataatgagatcacatttgactggtgcttaggccataatgagtgtttgtttatttctgatttatttatttttagagacagggtctcactctgtcacccaggccagagtgcagtgacaccatcgtagctcactgcagcctcgaactcctggactcaagcagtccttctgcctcagcctccagggtagctggaattacagacgcaagccaccatgagaagtatttgacgcaagcatgataagtatttgacatgcatctgatagcgttactagtctttgagattctacaggaccaaggaaagaaattgacttgcccaggcccccgtggctggttcacagcagaagcaggaatttgaatccacctcgttgctctttatccagtatgcttgtcgccacacagcaccgccttttctaaacccatcgagagcaggggattctttctgggcaccagacagctcccaagtttaatcaccagaaaacctcttttaaaatttcccactaggataaaggcatctcccacccagatctaacaaagaaccttgagcgtgcaggttttctcccccagtaagacgaatcccgctcctctgcaacgcgcctgctgccgctgtgaaacttttcctcatctgtgatcatgaatcaccctggaacccagcggggtcagagatggacctctcttcccactttgtaaatgaagaactgacaatcagagaggggcggtgtctttcctaaatccacacagtgcaaggttgcattctacaccccagctctgaatcccagtcacaccttcccaggcagcatagaagctgggctccagctgggagcttcctaacccaagcctcatttgcatacaaccttgtttccatgtctctgtgttcccaagacccaactaaccctcttagttggaagtaagtcagaaagtgccccttgcagcagccggaagcagccctttcagagtataaatagaatcgagggctttgttggtagagtaactattccagtcaagcagctccttcacatttgttattaattgtggtctgggcatacgctgcagagggaaattccggttgtagatgtttatttacaagcagcaggctctagagtacacacagccctgggagtcagtgcagctttgaggtagaactctggagctgggcctgttggttaaatcctgatcatcgtggatgagcagccacatagaaatgatggctatgacagtataatttattgaggatttgctagatgccaggcactgtgctctctcttctggatgtgaatgtccatgtggggtggattctgtgattatacatacccattttacagatcagaatactaaggcttggagagattgcataaaaggtccaaggtcattcacatctgcctgaccacaggtcatgttctaaacccctgcaccttgctttctcctcccaaatcattattgcaggacactgctaacatgatctttgccagcaccacaacagtggaacagcatgttgacccttgcaaagcaccttcatctctgctatgtctttggagcccaaggattacatagtcctcgtttgacccacaatgctgctaagaaatagggaatttgagtaacagaactaacacagcacagctatctactgggggagctctccgggaccccccatcatcctcagccttcacacctgcactgcaaaaatatacttgatattctctctcgataaacctggcttgttaacattcatctgaagtcagcttctcctgctgcctctaatcactctgatttttccacttattttctgttttgtgccatgggaatctgattacattgttaaattcttttttttttttttttttttttttggagctgggcactgtttgggttttggtctttcaaagagttccgtgttcataaagacccacatagctctgaccacatgtcattgttatatctgtcctgcagctgaaagctgacacatttcctctagggacggattttcctctttttgaaatgaggacagtttgattgagcatggtgaccatgacagggctctgggatcacagactcactccattctcagctcagctactttataactgggacctctccaagcctcagcttccttgtgcctacaatagaaagataatagctctgttttcatagcagttttgatagaaatgaataaaatcatgcacagaaattgcttaacacatagtaggcactcagtaaatggttgatctttctcctgactcgctgtcttccccctctgccccccatccccatccgcatctctatttctccttctctgcatgtctcctttctttagatatttttgttccttcccacccaccccttccccagaatagctgtactcagaagagctctgggttttttgttccccattctctttgcagctccccagactaactgtctgacccaaagatgactttatatttaagccaagggagctctcttgctggagtgatttgtctttgatttcacaggactctgccctttctccaaaagaaaagcatccatgtctgtgtctgtctgtaaatctgttctgccttttaaaactctaaagagaagttgtaaaagacctcagcatcaacatccaagccctttttaaagaccagcatagagtccttacacctatcctctatatcgcaaatctccacttctgcagagagcaagtggaaatatcagggctggctttggactcggcaacactcagcttcccctcccacctctgtcctcactcactgtgtgacctgggaaatgtgctgacctctctgagcctcagaggatgataacgcattcttcccagggtcaaataacaatggatgcataggaggcacttaagaaacaccagctcctctggatcagagcagccactcttcttcagaacacattcattaatttgctcattcaaaaactatggcaaaagatgttcatggctacagggaaaagcaagggttaatctcaaaggccccatacaccttaagtggatggatggtgtttgggatgataagctcttggaggctttgctggatgcatagttggagggtttgctgtatgcttggatggatgaatggttagatatggatgagtggacagatgagtagttagatttggatggatgaataaatggatgtatggatgaatgggtggagcaatggatgaatggttggacttggatggatgaataaatgcatgaacgaatgggtggatgggtggagggatggatgagtgggtggatggatggacagataagtggttggatttagatggatgaataaatggatgaatgggtggatgggtggagggatggatgaatgggtgggtagatggatggacagattagtggttggatttggatggacaaataaatggataaatgggtggaatggtggatggatgaatggatgagtggttggatttcgatcgatgaataaattaatgggtggatgggtggaggaatagatggatggatgaaaagatacagccttattaatcacctagaatcagcatctcatctaatacagaaatactggaatacctatgttagtccttaaatgcatgcctacctgcctgcaataactaacttacaaagtatttggttagcaacaagcaactaaaagcaattgttataaacttttccttccaaactctaggtatgatcatatggtgtgtattagtggttcagggcatgatctttggaatcagacctgtgtttgaatctcagcttaactaattaaagcagtgtgaccttgagccaatcccttggcctcttctaagctgtggtttcctcatttggaaagcggggataatagcattactttgtaggatcattacgaggattaaattatctaatgaacgtcaagggctggtcaatgctcaataaaaggtattgttattttactgatcccaaatgtgccttcctgtaacttttgtttcaccgagaaccagatgtgtgtcagatactgttcaagtgttgcagattctgtggtaaacaaggccaaaatagcccctcatctcttggagctaatgttctagtggtgtgttcagataataagcaagtaaacagataaacaattgcagacagtgttacatgctatgaagaaagttgaaatccggtgaggtgaaagagagtaaaagaggtgcgggtgaggtgaaagagagtaaaagaggtggtggtgagtcccctttttggactgtgaactaatgacaagaagatgcagccacgcagagatctggggagagggcgttccagatcacaagaagccagggagaaggtcctaaggcagaaatgagcttgtttgaggaagagaaagaaggccagaggacaagatggaatgtgagacccaccaatcgagggcagagagatctgagtagttagatcacaccagccatagaggctgtgtagtgtgatttggatattatctacgtcaatcttgtcttgtctcctggaactacgtagaaagagcctcgttcattcagcaaccattcagccttctgatgacagcttagactcccgatgtcctaatcccccagccccacagtctccatctcagttctcccggtttagatgctgggacacttgcagctactaccctgacaatgtcctgggtcccataaacccagaactcttaagaaattgggttggacccaagtgaaatcaggctgaggaaagctaggagatttctagttgggattgtaataaactaaactaggaagctgtgtttttatctgaagcaagagaaagaaagagaggagtctttgaggctgattttcggaataaaatatgtctgggactatttatccaagtggatgtggtataggatttggatttaaaagaacatgatagatgacagtgggtgatctgtagccttactgatgcaggagctcaaggcaggccacaagcacctggaccctcatccccccttggcaatgtactccacattagttttcttctcaggcaacctctctccgtgtgggaacagaaaggctcatagaatcttctagtctcctgtgtaacagaaaaagaacctctcaccgggcacagtggctcacgtctgtaatcccagcactttgggaggccaaggtaggcagatcacctgaggtcaggagttccgagaccagcctggccaacatgatgaaaccccatctctactaaaaacacaaaaattagctaggcatggtgttgcgtgcctgtaatctcagctactcaggaggctcaggcaggaaaatcacttgaacctgagaggtggaggttgcaatgagccaagatcgcaccactgcactgcagcctgggcaacagagtaagactccgtctcaaaaaaaaaaaaaaaaagataacctctcttatgtagtagttctaacaaaagtctagcattctgtcttattggttaattaacttggttgagtcatatgttcatctctaaacaatactgtggctatggagaatcagcattcccattggccaggcctaagctgtaggtccacccctgaaattgatgatgaagttaggtcttccccacccatatggactgagaatagaggagaggaggatgatgccacaaaaggtattggatgatgaagtttcagtcatgcaggacaagtaaatttaaagatcctgctgtacaacattgtattaataggcagcagtactgtagtgtacacttaaacatttattaagaggggagatttcatgctatctgttcttaccaccgttaaaacaaacaatatattggatgctattagaagaagggagaatgaattctggacaggcaaaaacaacacatgtatcttacgttcactaactcgaaattaactgcttcttcctctgtcattcagagatacatctcttatagctctcacctcctcctgccttgttcagtagcttaatatgtgtccatgtgtctcttccagcatttttaagctcctcagaatggaaactatgtcgtaacaaccccagggtcccctaaccccttttgtgcctgacagtgtgagaatctaagatgtgctttgtggcattgaattatgttttaaggcccaatttgatgactgtgcccctaaaatagtccccaaaagaagcaccagagaaacttcccacccctgcaaaggatggcagagcctcactttctcctctctgttctcttggattttccccaggtaaagccaacaagaacgtgcagtgggacgaggactccgtggagtacatgccagccaacccggtcagaatcgcctttgtcctggtggtccacggccgtgcctctcggcagttgcagcgcatgttcaaggccatctaccacaaagaccacttctactacatccacgtggacaaggtgagaggcctctgtgatcaccccttgctgggctttcttcggggtctgtccgtccctccctgataccctccttctgcattgctagtccagactgcctgctttcagaaaaggcttggaagctgaccagctgcctctccacagagcgtgtggccctagagtgctgtctctatgtgtgtgttggtttcaaagtttccagctgcgacttacaattttgtccataaatgataaatgctgtttttggggggttttttttcttttttttttgatggaatgtcgctcagtcaccaggctggagtgccgtggcatgatctccgctcactgcaacctctgcctcctgggttcaagcaattttcctgcctcagcctcccaagtagctgggactacaggtgcatgccaccacacccggctaatttttgtatttttagtagagacaaggtttcaccatgttggccaggatggtctcgatctcttgacctcgtgatctgcccgcctcagcctcccaaagtgctgggattacaggtgtgagccaccgtgcccggcccctaaatgctgtttcttacctctcccctctacccaatgccctctgcctgcctctcacatactttgtgggaatagcttacctttattagtccattttcatgctgctaataaagacatacctgagactgagtaatttataaagaaagatgtttaatggactcacagttctaagcagctggggaagcctcacaatcctggtggaaggcaaaaagcaagtcttacatggcggcagcaagagagaaaaatgagagccaagcaaaagaagtttcccggtgtaaaaccatcagatctcatgagacttattcactaccacgagaacagtatgggagaaaccacccctgtgattcagttatctcccactggatccctcccataacacgtgggaattatgggagctacaattcaagattagatttgggtggggacacaaccaaaccatatcactatcccaggagtgcgtacactttttctatggaaggcaagatagtacatattttaggtgttgcagggcacatagtctctgtcacagctactcagcactgcccttgtgctaaagcagccaaggagaacatgtcaacaaatgagcatggctgtgtaccaataaaactttattaacaaaaacctgcatcagccctgctgactcccgagctaccttgtccctgaggtttctattggtgaaacaattatgcctttagtcaagaaggcaaagggggaagtcttgtccaaaaggtcggcttctagcagacctgtgagaggataatggaggagcaatcagtaggagtggggacagaaaacaaaaattctgcctccgaaatatacatgggtttagatggagccatatttcccagcttgtcttcctcagaccccatgcagctgtcatgtatatgaatgcaaagttggccaggtgcagtggctcatgcctgtaatcccagcactttgggagaccaaggtgggcggatcacctgaggtcaggagttccagaccagcctgtccaacatggtgaagccccatctctactaaaatacaagacttagctgggcgtggtggcgcatacttgtaatcccagctacttgggaagctgaggcaggagaattgcttgaacttgggtggtggaggttgcagtgagctgagatggcaccactttgttccagcccgggtgacggagcgagactctgtctaagtaaataaataaagcaagactccatctcaaaataaaataaaataagataaaattttaaaaatgtgaagtcccaggcaccaccagcccaagcctagtgaaccattagctcagaagtgcggccagtgaatctgcatttcaaatagctaatttgaaatgtaaaaaataatccaagtttgaattgcagtacagaaagacactccagtccaggatcatttacttggcaaaggccactgtgctcagaagtgcccaaccaggagggaagacacagagaggggacaggggtgaggggcatgcctgggtattttctaggccactgactgtcatcaccctttctctcctgggaaaagcgctctaattacctgcatcggcaagtgctccaggtctccaggcagtacagcaatgtccgcgtcaccccctggagaatggccaccatctggggaggagccagcctcctgtccacctacctgcagagcatgcgggacctcctggagatgaccgactggccctgggacttcttcatcaacctgagtgcggccgactaccccatcaggtaaggcagccaagggccccaagccagtcttgtctgacgtcctgctctggctggtcatggctgggaactcacgaggcagaaggagactgatgcatagtctccacaggatcgctcaggataggattctgattggacctgagaatcattgattcattcactcattcattcatgcattcaacagatagagactgagcacgtggttttcccagctctattagctgatatgccagtgcactaaacagacggaaactccaacccgcgtggagctttatattagggttctctagagggacagaactaacaggatagatgtatatataaagaggagtttattaaggagtattgactcacacaatcacaaggcgaggtctcacgatgggccgtctgcaagctgaggagcaaggaagccagtctgattctcaaaacctcaaaagtagggaagcccacagtgcagtcttcagtctgtggtcgaaggcccaaagatcccaaagctgaagaacttggagtctgatgttcaaaggcaggaagcatccagcatgggagactcagccagcttattccttccacgttctgcctgcttttattctggccacgctggcagctgattagattatgcccacccagactgagagtgggtctgcctttcccagtccactgactcaaatgttaatctcctttggcaacaccctcacagacatggccagaaacagtactttgcatccttcagtccaatcaagttgacactcaatagtaaccatcacaagcttccattcaagtagggagacaaacaacaaaataagttaaatgatatcttagaaaaataaagtaaggggcaaaagtaggggacagttgtaattttaccaacggtggcctggaaggttttcacggataagaacagaagaagatgaaaaagagagtcacgcctacagagaaagtggtccaggcaggggcaaaggcaggggctgagcccagaggtgggtccatgcctggcctgtgcgaggaacagcagggttcagtggagctgtaacagagtaagtgaggggtagcataacaagagagataaagtcagagagtaatttgaggccagatcgtggtgatcctagaatttggctgttagtccaagcaagagggaagccactggcatgatactttgaatgatattctgaacggtatatatatctatatatatatatatattttggagacagagtctcgctctgtcacccaggctggagtgcagtggtgtgatcttagctcgctgcagcctccacccaccaggttcaagtgattctcctacctcaacctctgaagtagcatagagatggtgtttcaccatgttggtctcaaactcctggccccaggtgatccgcctgccttggcctcccaaagtgctgggattataggtgtgagccatcgtgccaggctgttattttctcttgagagggcagctttttcctttgactgtgttttccatctggatttgctgacaagggtgaaaaggaaagtggatgggggtgaagagggggatcttcctccctctgatggcatgaggccatagggttcagcattcccaggagacctagatgaaggggtcctaaaaaaataaaacttttattaaggcaactttcaaacatgcacaagagtaccaagagaatagtgtaatgaactcccacgtggatgtcacccaggttaattcatggccattgttcttgtatctggactttcatcctcttcccccaacagtgggttattttgaaagaaatataagatatcacagaattgtatctataaatatttcagtatatatctagaaaagataagatctcttttttaagacagcatcacaatgatgcttatacctaaaatattagcaggcatgttttaatggcatcaaatatctaggtcacatattcccaagagtttgagttttgaatcagaacccaaacaaggtacaagcatggaaggaagacctacctctctttaaagctagaagtggctgctttcttcttcacagcttggtcactgggggtcttcttcattcctaggcttgggggcatcccaccatctgctgggagaccctagactgcagaaggtactggggaggcacaatctctggtcagtttgaatggggtacacctgacatccttgaacctgagaaaaatgacaggcactagaaagacaactgttttcttttgtccataagacagagggataaacgggaatggttatagaacattgctggtagaattttacttaccacaattttgttcatttgttcaacaaacatttactgagcaactaccgtgctacattcgaagtagtgcattttgtgaacaaaagtgatgcagcttcctgtacttctcctctgctcatggaatgtgtatcctagctgagaagatggagttagatgatcatgccaaagatacatcatgcaaggtgtgaacaagccataaagcaaggaagatgtgggccgggtgcagtggctcacacctgtaatcccagcactttgagaggccaaggcaggtggatcacaaggtcaggagttcaagaccagcctggccaagatggtgaaaccccatctctactaaaaatacaaaaatgagccgggcatggtggtgcgtgcctgtaatcccccctacttgggaggctgaggcaggagaatcgcttgaacccaggaggtggaggttgtagtgagccgatatcgcgccactgtactccagcctggcgacacagcaagactctatctcaaaaaaacaaacaaacaaacaaaaaacaacaaaaaaaaaggaagatgtgggtgtggagaaaaactcgagggccataagcaggaggtcagaaaggcctctgaatattcagctttgaaccgagacctagaagacaagaagggatccattgggagggaaataagaaagagatccttctatactgggattcctagcagtggcactgctgatgtttggggatggataattctttactgtgggtgccatcctgtgcattgcaggatgcgtagcatcatctctggcctctacccactagatgccaggaacacaccctgcccacttttgccaaccacagatgtctccagacattgactcgtgacctctgggagctaaaattgtctccacttgagaatcaccgtttcttatagagggaacagcctgggcacaatgtagcacagaaacaaacttgttgcgtttgagaaatttaaacaatggatagagtataataaaagaatgaggagaagtgagtttagacaagtacatggcaaggaggggttagaacattccctctccatcttccatgaagggaccgagtttggaaatgtcccaaaatgctgagcatagcagctagtgtggcagacacttgtttcaacccttacaacaaacctgttttacagaggggcaaactgaggcccaatgtcatgtgatgaatgcatggcagagtggggattagaaccagtttcgtctggttgcaaagttggtattccttctggcttttagtcggcctcttagggaaatcagcagaactggactggcaggatggccccaggccaccttgaaagcacagaaggaaacagtcccaccccatgagcttgtggcggggtggagtagtggctggactgcctgcagcagggatgtccaggatggtcctgggaggacccccattgtctgttcctcagtcttaggggctgtgctcaaagttcccacattcttccttctctggattcccagtggaggcctcagaggtcatgccagcctaggttgggggcccgcattaagcccaagaccacttgaggccaggtaggcatgcgcattgctgccccctagaggccattgttggcttgctttgcgtggccacctcccctaaagagtccagctcggctcagcacccgggagggtgagtgcctgcactctcgtcaaactgcttacggctcgaatctgagttctgccacttagctagcagcgtgaccgcgggcaagtaaatccaatttctgtgaaatcaggatacaataatagaacctagcagcctgccggacacttggaaggtgctccatgaatgtcagccatttatacgtaaggtacatccaaggtctcatcttgtatctctgagaggcccagaaatcctttctcaggccatgcgtgcaacctattttggggttcagaaaagagagttgtcttatttgtggcttttttgctttagtgccccaggtcactctgtgtctcttggcctttctcatcatcttcctctacttcactgatctcatttccatggtgcctcccacgaattcctttgcccactcttctttgccagcctcatagccagaggcactttatgcatcaagcactgctggttcctcttgctgttgttttcatgaagttgccctacacaaaaacatatgaattttgcagatgaatggtttcatcctgggcaatgctgataggttttcagtttccatctgccgccccatctgtagcttccaaaaccactacttctcccatcccagaaagaatgagcaaacttaggagtcttctcaaaggggcggtagtgcccaagtcaggcacttctaagaggcactgaaaacttgggggatacttaagggtccagccagcccgacgtagccactgtgagctgctctgtgatttgacgtcacctccctgtgtcccctgcacaaccctcactgtggggggtgggggggtgtgggcagattcttcctctcttagatattaaagatgcactggtgtttactggtcactagccttgtttaggccctggacgcagacatcctggtttcagattctgccccaccaccaactgggcaagttgcttcaactttctgcatctcaaattctctaccttaaaataaacacaatattagtgcctatttcggagggttcttaggaagtttcaatgaaatcttgcatgataaggacctaccacagcgtctaatgacagaaagtggttgataaatgcccaaattactccatggctataagtaactgtgggacttgagttactttcccttttctctttgatagagttaaaagagtagcaaagtatttcttgaactcacatctctgtcaaaagagggaaaagtgggccaagcacggtggcacacaactgtaatcccaggactttgggaggccaaggcaggtggatcacttgaggttaggggttcgagaccagcctggccaacatgatgaaaccccgactcaactaaaaatacaaaaattagccaggcatggttgtgcatacctgtaaccccagctactcatgaggctgaggcatgagactcacttgaactcgggaggcagaggctgcaatgagccgagatcgtaccaccgcgctccagcctgggtgacagactgagactctgtctaaaaaaaaaaaaaaaaaaaaaaagggtgggaaaagcaaagatagacgtgagactgtttcaagaaaaacagaatagatccaattcacttgtggacatgaagaatattcctgaacttggcatacgcaagctgagagtgtttagagactctaggtgctcctgctctgctgttgacatgacatcctggtccacgtaggctccagctggagctggttgtgtacccagcacgtggatgaaagtggaaaatggatactttcaaactctgaggccctgctagatcttgaatcctcgaaaggtatgatggttttattcgtatgttctatttaccgaggcaaggaattatacctggcctactttagattggctgcaggaagagatgaagccaatagcactttgccctgtttcttggcttggacttgtagtaagagacctcggctgggtgtggtggctcatgcctgtaatgccaccagcactttgggaggccaagatgggtggatcacctgaggtcaggagtctgagaccagcctggccgatatggtaaaaccccatctctactaaaaatacaaaaagtagctgggtgtggtggcgggcgcctgtaatcccagctacttgggaggctgagacaggagaatcacttgaacccaggaggcagaggtggtagagagctgagatcatgacattgcactccagcccgggcagcaggagtgaaactccatctaaaaaaaaaaaaaaaaaaaaaaaagagagagagagagacctcacgcctcacactgtgtcttttcctaagtccggtgtcttggggcaaatcagatgtaaagagaggagggttgagtgtgtccttggcccctcccggggttcacattcagtctgtggtgtgtacacacgtttgcacatgtggggcagtgtatgtatacagaaaccaggcaggggaaaccatgttgacattttcctgctacttctgcctcttgggtatccacatcaacaaagtccaaactatcagggcccaccacatggacatgtaagttacattaactgcagatccaaatgtctgtcttgagatactaccagagccgcaggctgagaacatgagagagctgctccatggcgcctcagtaggaaacaccagctggtaaagacaggaacaggtggccagggcttctctacagtctcccgaagaccagagtttatatgggaccaattgagcaagactaacccccagactaacagagcagacacttactgcacacctactgtgtgctgggccctcttcagggccctttaccacatatttcttcttaatcccatcccccaaaacacaactgctacttggtaagtaagtttagagaaattagtattaacacagagcagaggaagctttgcagggaagtcaagcccttgataatgttcagcacagatcccagtcactctgggatttgaaatgaagatgagcagtatggaagtccaagcatccatgtacagtcactgcatctgcgtacagatcacatccctttagtctgctaaagtggaacccgaataggtcaaagaattcctgtagttaagaccgcacagcaaccacagcaaatgtatatgtagcacttcgtacattcctagcattattctaagtgctttacaattcagggatgtctgagggagagaatacagttatggctcctcagtttcttttcttggttgggccagtaaagccccttcctcatccctcttttctgcttatcactagagacagaaactaaaaaccatggcttcaggctgctaaaagcctaaaacaaaaaaacaaaacagaacaaccaaataaggcagggttggacaagcttgtttacatcgttttgacaacaactctgaagtatgcactcttgatatccccatttttcagatgaataaactgaggcacagagatgttaagaaacttgaccccaaggctacagccagtaaactgtagaatcatgatcctttttttttgaaactgaggtgaaatttatataacataaaattaaccatcccattactgggtgtatacctaaaggattataaatcatgctgctttaaagacacatgcacatgtatatttattgtggcactgttcacaagagcaaagacttggaaccaatccaaatgtccatcaatgatagactggattaagaaaatgtggcacatatacaccatggaatactatgcagccataaaaaaggatgagttcatgtcctttgtagggacatggatgaaggtggaaaccatcatccttggcaaactatcgcaaggacaaaaaaccgaacaccacatgttctcactcataggtgggaactgaacaatgagaacacttggacacagggtggggaacatcacacaccggggactgttgtggggtggggggaggggggagggatagcattaggagatatacctaatgtaattgacaagttaatggatgcagcacaccaacatggcacatgtatacatatgtaacaaacctgcatgttgtgcacatgtacctgaaaacttaaagtataataataaaaagaaactgaggtgaaatttatataacataaaattaaccactttgaattgttgaatggcattcagtacattcacagtgtcaggcaaccgtacgctctctaatcctaaacattttcatcatcccaaaagaaaaccctgtacccattaagcagtcacttcccagaaacctctcctcagtctctggcaaccactaatctcctttctgtatctatggacttgatttgcctattcttgacatttttatttatttattttgagatggagcctcccctcttgttgcccaggctggagtgcaatggcacgatcttggctcactgcaacctctgcctcccaagttcaagagattctcctggctctgcctcccaggtagctgtaattacaggcatgcaccaccacacctggctaattttgtatttttagtagagatggggtttcaccatgttggtcagtctggtctcgaactcctgacctcatgtgatctacccacctcagcctcccaaagtgctgagattacaggtgtaagccactatgcccagcctattctggacattttatatgaatgcagttacatagtatatgacatttggtgacctgcttatttcacttagcttaatatcgttgaggttcatctgcatcgtagcatgtggcagcacttcattcctttttatggctgatattctatcatgttgatatacttgtaccacaatctgtttatccaattatcagtcaatatactcagcattctgaagcttcccaaagcccctgtctcctggccatgttgtatctgcactgtatgccctgaattgaggacctcatctggtttaagaagatgcagctccatcatatgggactctgcccagcagtggtgctggaggactcttgttaagcaagccctggtgactgtttggccatggggggttgtagatctgagcatattggcctgatggcctttcccattcacaccggatcttctctacccatgctagcccctggacctcagctgaacgggaaagaaacttcagtgattctcattgtccggggaagattcaggttgaagatggaaatgtggaggagtagagtgtgaggtccaagcttccctttttcccttcttccttctctcaacaccaagccccttctgatgacaatcttggggtgctttgaggaggaaagtgcttaggtcagcccagtgaagatacttctctactcccacagatgagttcaggagacagggctccttctgactttacccattcacccaaaaaaatatttattgagcacctactatgtgttggacactgtgctaagcagcaactcaaaggtgaggaaaaacatatccagccctgccctcatcgtagtggtcaagggtacaggctggagccagtccacctgggtccaaatcgcagcttctttatttactagctgtgtgaagttgcacacagcagtccctgtgcttcagttacttcatctgtaaaatgggcataataatggcaccaccccatagggttgctttgagggctaagtgagtccatatatgtgaagtgcttagcacacagtgagggttatccatgtgatagccatggttattaatagaggaaggagacagacattaatcacagagatcacaggagtgcacatatgacaaagtcaggcaagcattgtgaaaaaaaggaatgaaggatctatgagcactttgcaaaggaatctcacatggactgagggcccggatggcttccctgaggaggcagcctgtgaactgagatgtagatgctgggtaggagtttaggagaagtgtgaggaggttccaagcaggcatcccaggaagagggggtagcttgggaccctggcatatctgaggatctgaaagaaggcaactatgggtgaaacataagaggcgagggtttgccttcttacaaatgaggtaggtcgaggcaagcccatgtgggcacttgagatgtcctgttgggtcactaaagcctcagtctgtgagcggtgaggttttaggggagagtgacaatatttgccacattgagagatcgtactggctgccgtgggagaatagttgggagtggggcccaaatgggagtggggaggccagatcacaagcagttgcttctactgaccccagagccacatccacagagccccctattctccaaacctccaggcagaagcaggtgtcctagaaggaagccataaggagcttcctgaacccaagcagccatgaagtcttttagtcactcagagccaggcagccaccttctgtttggggaccaggaccccacacctgtgcaaaacagcctcgttcaggagactcagaggatttcaacaggagctggagcagagaacagagaagcaagcgtgagatgcaaggatcttaggagagcgggtcagaaaaaagccaatcataagccaacaggggcgcagccagaggattagaggaagaatgtgggttgagtgaatgtgagaaagaatatggtggagacccctctttgtcttttgttctttttttttaaagtgataaaatatggtgagaatgataaaataagtgagaattgcttgaacctgggaggcggaggttgcagtggactgagatcacgccattgtactccagcctgggcaacaagaccaaaactccatcccaaaaagaaaataagaagaaagaaaagaaaagtgataaaatacacttaaaataaaattgacctttttaatctttcttttttttttttttttttttttgagacagcgtttggctctgtcacccaggctagagtacagtggtgcgatcttggctcactctaacctttgcctcccaggttcaagtgattctcatccctcagcctcccaagtagctaggattacagttatgcaccaccacatctggctaattttttttttttttttttttttttgaaactgagtcttgctctgtcacccaggctggagtgcaatggcgtgatctcggctcattgcaagctccgcctccctggttcaagggaatctcctgcttcagcctcccgagtagctgggattacaggcacgtgccaccatgcctggctaatttttttgtctttttagtagagacagggttttgccttgttggccaggctggtctcgaactcctggcctcaagtgatctgcccacctcggcctcccaaagtcctgggattacaggcatgagccaccacacctggactgattcttctacattttagaagaatccaaaatgtcttcctatcctatatcagtcacccttctggttcccccatttctctgaataggaccaccctcctcctgagcacctgcagctggaagcctgtgtgcccccttccttgctgctccatctgcaccttgcgtattctcgttctaaccctgacatctctccgtgttcatccccatctgtgatgcccttcatccccacccaggtcagaccctcttcaccttacacctgcaatattagcacaggtgtgctctgacggggactccaaggtctcccaggagaagacaggctgagccagactcttaaaacaggatagagctgcttctcaaggccatttcctgagcacccgtcatgcgtcaggctatgggtgttccgcagggagcaggacagacaccatccctgccacaaggagcttgacatctcactatgtgcttctcagccgggtcaaatcaaggttctatgtgattctcagaaattcagagttcagcaggcgcagtggctcatgcctatcccagcactttgagaggccgaggtgggaggatcacttgatcccaggagttcaagaccagcttgggcaacaaagcaagacccccatttctaaaaaaaaaaaaaaaaaaattaaccaggtgtggtggtgcacccctgtaacgccagatacttgggaggctcaaaataaagaaatcggctgggcatggtggctcacgtctgtaatcccagccctttgggaggccaaggcaggcagatcacctgaggtgaggagtttgagaccagcctgaccaacatggtgaaaccccgtctttactaaaaatacaaaattagctgggtatggtggcacatgcctgtaatcccagatactcgggaggctgaggcaggagaatcgcttgaacccaggaggtggaggttgcagtgagccgagatcgcgccactgcactccagcctgggcagcaagagtgaaattccgtcttaaaaaataaaaataaaaaagaaatctagagttccgttccagatcaactgaatgtaaattccttgtggatgccaagaatcaatttctctctctctctctgtgtatatatatatttgagatatttgagatagagtcttcactctgtcacccaggctggagtgtggtacaatctcagctcattacaacttccacctcccagttcaagtgattctcctgcttcagcctcccaagtacctgggattacaggcactctccaccacatctggctgatttttgtatttttagtagagacaaggtttcaccttgttgtctaagctgacctcaaactcatgacctcaagtgatctgcgcacctcagcctcccaaagtgctaggattacaggtgtgagccactgcacccagccaagaatctatatatttttaaagtgtccagcaccctgcaggtgattgtactagtgagaattgaaatccactggtccagggagagagagagacatctttcacatagttagaaaaataaatagaagctacatgctgtgttggaaaatgttagcctcagtacttcgtgggaaagcatacttggtggcccaacactcagatatttgggtgtgaccatctcccctgcattctgctttctcagcatccaaaccacttttgttctttgggacgttcagagacacacactctgcttcctgagaccccaaaattcctgggttcgaaaccatccaataaaacctccacccagataatgtgtgagtttgaaagggtgtatctgctcggactgttgttcacaaggagactggaaaaacatgccagtaattatgccgttaacagttttgtttgcctctagtcacaaaataaacatatcctcagccctgttatttttcaggctgatggagcacacactcctgcttttgcagaaatgcagtttgcttccctcttgccagttgtcctgggtctcctgagctgtattttaggctggtcagctctttaagccttcttaaggccagaagtgacctagaccatcggctggacaaacagagtgagcctagagttctcggagatctcatgaaaaccaaggttctgcagaaagccaagagtggtctatgggcttaggaccttctgggaaggatgtggtggaagacaagaattgaagtgactgcttcacccaagggatgccatcatctggcttaaataacttttagttgtattgtttgtttgcttgctattttgtttgctttctctttctttcacaacggaaaacaaaaaaaattcagagtcctggggaaaaatgtgatagttctctcttgagttgtgtatcccttctttggctagcagagaatagagcacttggccattcatccattcattaaatagatgctcattgagattctgctagatattaggcaatgctctagaccagcactgtccagtggaactttcgggggtgatggaaatgttctataagcaccatcctgtatggtagccgttagccacaggtggccattgagagcttgaaacgtgccttgtgggactgaggaactaaattttcaatttgatatgattttaatttaaagttaaattaaaactgtgcgctcatgaaccttacatcgatgccatggggtacaaacacttccactagagagaattatactactgttaccagaagaaaagagagtccaggctaaatagtacagaaataaatgtggtctctgtcctctgccaatttgatattctcaccagatcccagcttgaccacacaatgaattttgcaatgtattttcttccgaatccctccctctccagatctcacaattctccttcctcttggcagcggctctctatgtgtctgtggatgggacgtttccaaccctggcatcttcctgcccagtgcattgagcatttttgcttattggcaaaaaaaaaaaaaaaaaaaagccgtcttttatgtgactttttctccggtggccaagagtatggacggtatccatgctgggatgctccaagtgcatcctgggaatttggatgtgagcccggggtggtctacaatgtgggtggtctttattgtagagtctattattcttcccttgcctgttccttacatctaactgcaggtgaagattcttttcaagggcaatctggaggaaccgcatgtattaaaagtgggataagggaggagcgtttctacccttttaaaaattgatgagggcaaagatttgactgagtataggatccaagcgacagggttaaggtctgatcattaggcacacagacggactctgtggattattcttattatcattcaagtattttctctcccttgctcccaccctgagtcattgtccagcatggtcaatagtagccactcaaagtagatgcctgggaaagccttttaagacctgccatactccagtagctaatcatatttgctgacatttcttgactacttactgtgcataggattctaggccaagtgatttccatgcattatctcatgtaattctcacaacaatcccagaaggtagatagtgttactgcatcgcagtatgaagaaaccaaggctgtgagaagtaaagggattttctcagtgtctcacaactggtgggggttggagccaggatttaaatgcatgcttctttcatcacggggagtaggggcagagaggaaaggacctgagttttttgccaacgggtcataatttcacctgctggatagttctggggtaaagctctctcactcatttcttccccatctaaatccttggtttctgtatctggatgagaatccaggaggcagagttgtccacgtatcaagagatgagcagggtacatcagaacctgagatccagagtgacctaatgtttagccaactgccaagttgcccccactttctgctttagtccccatggcatcccagtaagatgacatatagaacagcaccaggactcagagtgttcaagtgacttgcccaacgtcacatgacttgatcgtggccaagctgggatttgaatgcaggcttagctgaccctgaagttcaccatgctttatgcagtgtgttgtgtaagtggttgaccccagggagggaaagccgatcacccaaggatgccaacactacgatgtggctgccaaagccaaaagccagtgtagacccatctccagatggtctctttctttctctaatggaatatccaagctttactgactgtgtgctctaagcatagacctaggaaccatctgtcctgcgttagcaagaacaaccccaaccttcaaattcctttgtaatcctgttcccattggacctcagactctccatatctctaccctaactggctatctggtggtgcccagtggaattctcattcatttaaatattagcctaatgcaagcataattagaaaggaatggcttctgtccctccccccaccccaccccccacatatgcctaattgtttcaaagcaaaatcaaagcaaactcaaagcaatgctggcatattctacaccatcaagtcattccactacgatgtagaagaggccatgcaatatcagcctgacctggatttgaatcctgttgctatagattgaaccgtgccccactaaaatttatatgtcgaagctctaacccttgtacttggagatagggcctataaggaggtacttaaggtaaaatgagatcataagcatggagccctgatcctatagaaggagtgtccttctttataagagacaccagagagctcgctctctctttctctgccatgtaaggacagagcaagaaggtggccttctgcaagccaggaagagaggcctcaccagcatctaattgacaggcactttggactttccagtctccagaactgtgagtaaataaatctccattgtttaacccacccagttatggtgtcttgttatagcagcctgtacagaccaaggtacctgtcctcatcccctgtatgagagctatatgctctcaagcaacaaatccaacctttgtgagtctcctttttctcacctgtgagagggcatgaccatgctacccatcagggagcggtaaaaggaagaatagccaggtgggactccaggtactgctttatttcaagctgtttgatgacagctaggtcagagcatggtggctcaggtctggcagctccatgtgacctcctctccaccttctcaccatcaaaacattgggaccaggatgcttggtcatactgatggatacaaagcaaggagagatggttgaatccaccagggagaccttagcttactgtacccaccccgttgcatcaagcggttggggtaactcatcgtggccccaagaggcttaagtaccacccaggcctgaggcaagaaacattaaaaaaaaaagaagtgcaattcatttgggaggaggaagggttcacagaacagatatctagcccactaataaccatgtctcaagcaatctctccagcactaagtaatcctaccctcagttcctccctttgggtaaatgtaggagagagatgggcagaggagaacctgctatgggcagcaggctagagtgccctccccagggtactttcctcataggattgttagaaacatgaaagatagtggaacacaggacctaatccggaattgggcattttttaacaaggaaattttttgatgataatggtagtgatgacaatgataattaataatcctgtatagttattaattctggacaaaaacatggtctggccttgtgtggtcactttccttattctctccttctttcttcctcttatattttatgtctctattccttgtactaatacagaaatgcagattgggcagggggcacctgcctttgaggaagtctgatcgtgatgagagtgaggaaggtagttgccttgagctgagccttctttgcctgtagttgggcccccatattccctccctgctgcaaggctgtttgaagacagccctagtgtttactggccttctctaccccaatgaggtgaaacaacatattccatttctcaagtccatttctccacttactttgaaaaatcaagtgcatttctccagttactttttgaatgcaactgcaatctacctgaaatttcaagtgggaaacttccttccaattcccagcctcaccaaccctcaccccatccccatgctcaagtggcctgcctctgaccctcccctggtggccccaggcaatatcagaaagtgatttggacatctgggcaggtcagcttcctaggaaatcatcatggaacagaagccaacgcagagagcaaagtcttcatggttcatgagactcccctgctgcctcctcccactcccactcagcttaggtgaagcaggcccatgaaggtcagatggagtgtctctagaacctggaatctagtcttggcccactgcctataagaccagttaatccaaaagtggagaatgggaaggggaaggccatttggtagtactggccagttttcccatggtagggggtgaaggggaatcccacaatggtggttgttcccttatggagaaggaatgaaaaactgtgcccctaaaagccatcacccgtctcctatgtcctttctcctccagggagggattctcctcagtgcaatttaattgtattcatcagtcaacattacttggcaaaccgagccaggggcacaaacattgccaccctttctcagtctaatcatgctcttcaggatgccggaatctggtttaaggccaagcagaagcaatttttgattacagagtcaatctttgtttaaaatttgccaccctggggaagtttccaacaagttactttaaacaatgcattctctggacacctacagctaaatagtcccattaatccaaattgctttgctgggttgtggtgcaaccattcaggaattggggcagtgtctcagacaggcttcatgacagtgatggctgcagtaccaagggggcactgctttgtcatgaactgagcgaccgggagatggccccacccctgagagttccctgccactgagtttctgcaggtgctaagtgcttcttctatgttctcctttaatctctcagccatctggtgagatgggaccttcattgtccccatttgcaagagaagggacttgagcagatgctcagctacccagaagtggagctcagtggagcttaaacccacccatgtccttaacaatgagtcaggacttcccaagtatggcctgtgggccgcttgcagtatgtaagatgatttaaagagaaatgcaggcgagtctttgaaaatgtccatgtttatctatattaacacatagaagggaataggaacatgttcagcccagattttggaagctgaagtttccttaaaaataaaaagtaaataaataaataaaatgaaagttgatttaaatgagaaaatattaacaaggcaacaatacaaggggtaagtggctcttcagtcatttggcaagtacttattgagtgcctggtatactccagccattttgctgggggttgggaatatggcagtaaagaaagcaagcactgttgtgcatcctccatgctcattagagaaagagacagtagataagtgagcgggtcatatatcaggtagaaatgagtaccaggaaaactattgcatggaaagaggatagggtgggtcaggaagacacttcgattagacggatatgccagaaagttatgaggaagattgtgaatgacccaaaaaagagagttatcaggcgagggatcaacaaacttcttttctagcttttatttgaggttcaggggtacatgtgcaggtgtgttacataggtaaattgtgtgtcctgggggtttggtgtacaaattactgcatcattcaggtgataaatggagtacctgatagtttttcgatcctcaccctccctgcctcctcaaggagaccctggtgtctacccttcccttctttgtttccgtgtgtactcaatgtttagctcccccttacaagcgagaatatgtatttggttttctcttcctttgttagttcacttaggataaaagcctccagctccgttcattcaacaaactttttttttttttttgagacagggtctcattctgtcaccctggctggagtgcagtggcacagtcacagctcactgaagccctgacctcccaggctcaagtggtcctcccatctcagcctcctgagtagctgggattacaggctcatgtcaccacacttggataatttttgtatttttgtagagacagggttttgccatgttgcccaggctagtctcaaactcctgggctcaagccatctgcctgcctcgagctcacaaagttctgggattacaggcatgagccaccacgcccagcctcaaaagtttttattaaaaggccagatagtaaatattttaggttttgtggtacatatatgtctctcaggatgacgaaactctgctgttgtaatactaaggcggccatagacagtatgtaaatgaatgggtatgactgtgttccagtaaaattttctttctaaaaacaggtggcaggcaatagtttgcacttgatcattctgccagatctcccatgtttcagatcgtggccttgcccagaacacgtacatctcagccctttcaaatttagtgccaacccactcacccatcttcctaggcatggcctttgcttcactatcttagatgattctgtcaacccaggtggggttgaatctgaatcacctcaagtgcttcagacttcaggaccctggatagagaatgagtgatggagatccccaaggccttctgctctacctcccctaggccttgacctggatttctacccagtcctgggtagctgaaccccttattaaacagcaggctccctttattttatgttcccctaacctacttcgtgtgccatttctgaccttgagctggtaaggagcacatgaaacacagctcacccatcagtgttgcctgaccaggggcggccgagaggagacaggcagtttgcacacagacagtcctccatggctatccagccccgcagagttcctgccagccagagcataccggttttcttaccacccagccttctctgcctaaacgcaggataaatacctggtcctcattagcaccgtaattcaccctgcaccaccttcctcaatctgaatcaaaaaggttaatgtcattgaatcctgagactcgttgatttcagcacttaccccaagtttctgctcccccgctaaaagcacagagctcgtttatctttccttggttgaccaggcaagttgctgactaatgccttaatgccagctaattctcaaagatttcccagagtgactggacatgtgttcctctagtactttctataaatccagttgatcttgtgtgtctggttttctactgactcactgcctggatgtgtctgggctcccctcctgtaatttatcttggaagtctgtctcaggttgcaatgttaattcaggaagagagagatttttaaccaaggtggtgtccgcaaaatacattttaatgaactatcagctgtagggcctcactgtgaatttgttcattcattcatacattctagtcagtcaacagatgcttgttggaaacctactgtgtgccagacatttgccaggacctggggttacagacaccaatagaaccattaacatcgctgcctttgaggagtatacagattaagccatcaaataatgacatcttcatgacattgtcaggaaagaaatttgcatgcatataatgcaggaaacagacatgcatatcaccccttctcttctaaaggaccagggaaagcttccctggagaagtacccatcccataaccacgtctcaagcaatctcactggcactaagtaatcctaccatcagttccccctccttttatgtaaaactaagaaggagatgggcagcaggctggagtgccctctgcccagtggtttcctgagagttgaaagaagaggaggaattaactgggtgaaaaaaagggggcggtgaacattgcaagcagcaggggctgcatgcacaaaggcactgaggcaggagaaaacatggctcctgtggtaaatgaaaagaggcttatgtggacagagtgtggcaaggggataagccaatagaatgaggccagagaggcaggtgggggccagaccgtgtgggacctttagagccaggttaaggagtccaagcttatcctataagcaatgggaagcctttgaaaagttttctattagaaaatgccatgatgagattggttcagtttataatcagttgcttggcagtgggaaaaagaaagttaaaaaaaaaaaaaaagtagaggactgtaccagcctgctggaggaggggaaacatgatagctagtattttttgctagtagatatgtacattatagctcaggtaattactttccaccaggctaaatgcctcctgttgctttgttgctattattttctcttggtgttgagcttttctgcagcataccttattcttaggcttcgtggccctgggtttcctggagagaccctgtaagctggatctggaactggacctacaaacctccttctgctagtcggcaggaattttccagggctcaggccctcaggccagtgcagcaaagcggttgaaagtgtgcacttgaggaggcagcagagcctgagttcaatttccagctgttctgtttactggccacgtgcccttgggcatgttgctcaacctgtctctgcctcagttttctcatctgtaaaatgggaaccatcagttacctgcctcagcctttactgtaaggatgaagctgtgaaatgtgtagcaccttgcctgacccagagaaagggctcgagaaacgatgatagtgatggtgacccaagctgcccgggtgacagttccacaagtggagagatgacatctgttttgctcaccactgtgtcttattcctggtacagtgcctggcacatagtgagagctcagtaagtacttactgaagtaaggcatgaaggagcaaatgagtgctcagtgtttgtcccatataacaccactgtggctgcagtggctgtggtcctttatttctaagtgccaggagagtcactgatattttaccgcattttttttttgcattccccatttattaaaaacatctctgggcttattcctagattgaggaccagtggaggggttttgtctttacttaatgtcttttcacctagagacgttttcagatttcaccaccatgaaaacagaaaacattccaaagagctggagagtttatttcaaaaggacagtgagctgtggtaggtactcatgaatcctaaggttggctcagctgcttctccacataaagtggaggtgcctgcacagatatcaaggatctgtgtctgggagcctggcaggccagagggacattcacatatcacacctgtctggctatatgctggcttccatgcagcctgggggaaggtctggatcccatgaagtcacttgatgtcatggagcagatacctagtctgttcccattttccatgagagaggacagggaggtaagttctgcaggtgtccacattccttcccggctccatgaccacgcctgcgggctccagtggtgatgcatatggactctgaggtcaaatgacctgggtgcaaatccctgtttctgttacctgtgggctgtctaacctaggccaagtcacttaacctctctgttcatcttcctctgtaaaatgggtgataatgataatatgtacatcatgatgatgttgggaaggcaaactgagccgatatgtaacaagtgcctcagcaagcaactcttatattctatacttattattgttatgatcatcatgattattagacacgttgcccaagttttgagaagtttgctccattgtaaaatggagctactgctgcctattttaggggggttgtgaggattaggtggatagcgtatataaaataggtaggatacaccaaacatggttattattgtagctgttgttttatttctcagtttgaaattttggggttcaactgtcatatttttattgtggcataaaaataaaaacataaataataacattaaaatatgttggctggatgtggtggcacacacctgtaatcccagcaatttgggaggccaaagagggcggtaacttgaggtcaggaattcgagaccagcctggccaacatgatgaaagcctgtctctactaaaaatacaaaaaattagccagatgtggtggtgcatgtctgtaatcccagctacttgagaggctgaggcaagagaatcgcttcaacccaggaggtggaggttgcagtgagcggagatcgcaccagtgcactctaccctgggcaacagagtgaggcttcatctcaaaaaacaagttatatttaatatgccaaaaataatatacaactgaaattagtggcgcttaatacattcacaatggtatatgagcataatcactatctagttacaagcattttagttaccccagaaggaaaacctgtacccattaagcagtcactcctcattcccctctgacccccaacccctggcaacccccggtctgctttctgtttctgtggatttgccaactctgaatatttcatataaatggaatcatacatcatgtgggtatttcacgtctggcttctttcacttagcattatgttttcaaggttcatctgcattgtagcttgtatcagtacttcatctctttctatggctgactaatatcccattgtctggatagacctcatttggctttatccattcagcaggtgatggacatttgggctgttactactttgggctattgtgagtagtgctgccatgaatagcatggccaagttttgttcgaacacctgttttccattcttttcagtattacaatgactcttaacatatgtggttcagctactttagagaaaaagggaagaagtaataagataaagtagaaaaacagaggaatttcagcttctgtagatgtatatctttcttttgtgttttatttatttatttttttggccaccctctggagggccagccagggaacaaccacagagaggttggtcttggtttggtctctaactcttgggttcgtcaacatcccaaggaccacagcttccctgagaaaacctttgatgactgcacattgcagcctggggaagcctgccacccttctccctcactcagagccaaataaaaaacaagggctaccagataatcaagcgattactatgtggcaggcactggattgagtcttccacacccatgatctcatcaaatctttgctcaacttagacaaggaaattgaggctcagaaggataaagaaacctgcaaggtggtaccgcaaggattaaggagtagagatgatctttaaacctatttcaccttttgccgaatgatgattctgcagaacagcagcacgtcaagctgtcactcagttaggctcgtctcagctggacctgctgatgtatctgccttagcatgaaaggaattctgtccgagtttgtgaattccattccaggaacctggcacagactcggagattgcattcaacctttgtccctgtgtgcattgagcaactataatatgccagacatggcgctagccaagccttgctcaactgaggttcctcatttgagccacaaaacacaggaagtgggcagagtgcctgtgttcttgattctagcaaggatggtatgtgactagtatgctcttaatgcatagagggaagctaatccaggatgtacgtggatgcctcggaacaccaaagctccattctcagagggattttgtcttcatcttcactgtttctccagcatctgaaacagcacgtgactcatagtagctgtaacataaatgtttgctgaatgagtacgtggaggtagtgtggcgtgcacaaatctgccttcatctactacacgtcctgtttgacaatttataatacgatcctgtttttacaatgcagccatttaaatactcagagacctggcactgaaaataattcatcagcgagcaatgaacttgtgtcagcatcttcccggcagagtttatgtgatcagatcccagatgacatttgttactaatttggttttttttgtttgtttgtttgtttgttagtaaagcactgtatcagtcaccataggagcgcagaaggagcaggactaaggtattgcccctgagtaaatacctctctgggaaaagaaagaaatatctgtaaatgaacagcttttacccaagaagcaggaggtatgagctcatgtagagtcaaataaaacccgggcttaaatgtcctcaatgaaatgggcccatacaactcaaagtgatacccagctgttgaaaaagcagaattcatgtctcaagtcagaaatgaacacagtcggccaggtgcggtggctcacgcctgttatcccagcactttgggaggctgaggcaggcggatcacctgaggtcaggagtttgagaccagcctggccaacatggcaaaaccccatctctattaaaaagtacaaaaattagccagatgtggtggtggatgcttgtaatcccagctactcaggaggctgaggcaggataatcgcttgaacctgggaagcagaggttgcagtgagccgagatcacgccactgcactccagcctgggcaacaagagcgagactccgtctcaaaaaaaaaaaaaaaaaaaaaaagaaatgaacgcagtctttggcacataggaagatgctcagcaaatgcttatggcagggcctgaattgttgaagaactgggaaattgtatttaccaggaaagctaatagagcttgcaggatcttagagttatgaaagagcacaaaacattcagaaaacttcaagtaattccaaagattgagtaggcaggatgcaggaagagaaaggaaagaaaaggacaaaggaaaaggaaagagaaatggaagagggagagaaaaaaaagggagagaggagggaaggaaggagggaataaaaagaaatttaattcacagctgcaagagtaacatagttaatacttactaagtatttactgtacaccaagtacccatgctaacaggttaacctgatatcattccttctaaccccaaaacaactccacaaggcatgtcatattgcgattcctgttattataaaggcaacagtgctgttcagaaaaattgtcatctgcccaagattgggcagttagtgagggcagagctcagccagttctgctattgagtaagatgccagcctccttcctctcctaaaggagaactggaagttaaattggccgttttttaaatgatttttgaacacttgtttttaggctactaaaccatttttgcacaattgaaattttacccaatataggggtggaagtgagtcctcagtaaggaaacctctactgaggtgtcttgaggccccagctgcccagccccaacctggggttcccccagatgcagcttaaaaaccgatgatctatgtgataacgtctcatttaaatcatttctgaagttttctttgcctaggaactgtcaagttacttcaaggcctgtgtcctctgtttaaaaagaaaaaatccgtttaaaaatccttttgaaatttctcatcagccctctgagataaacaagtaaccttggaaatctgtgggtaaagagtctactggacgcagcatgtcctgatcctccagaatcgatctctgtgttgcagaaaccacagtgtttgtttttccatggtgtgtatgacttcttgcctgtgttgcagtgcattttgaccttgttccaatacagacaggcaggtgaatgtggcaagctgcccaaggagaatgagatgcttggtgacactatcaactgtccttcaagctcaatctcaccttggggctgaaatccaaactgacccagtcccaaagttctgggagttagagatccttgctgtatcctactcctggcacagtgcagactctagtcctggagaattcatgataataaaaataataacaataataagatctgacattctagcattctgtgggctaggttacctaagctgtactagatctctcttgttttcactggctcaacactcattacccgacttctgataccagtttctgtatcagctagaattttgtagttgcaagcaacagattattccctcttatttcattacatcttcaactctataaggtaaatagtgttattatcctcaattttaaaaatgacaaaattgagcatcgactagctaaaaatgacctgcccaaggccacacagccaataagtagtagaactaggactcaaacctacatttctctgatgtcagatctgcattattttaaccactgcaaattctgatacattagtgtaggtgcgttaggaagacctatgtggtgaaatggaaatggacaaattagtattataggtcatggtgattatttgaataaacccagggcaggatgaatggtgaaaaaggcatctgttctcagccataagcacaaagagaaaggtcagcgtgtcagtacagttcagtgccattcaatggttatttatactccagcctttcccagtggaactgacattgagccagcttttgcaaaggcaagcaggagttctctaggcaaaggtgtaggaaggatgtttctggcattagggatggtatggacaaaagccctcattctgtcctgcaacacagttgtgctgagcagtttccgtgggctacagtgaaatgggcctggggacccaaagagaaataggcataaggctgatggaacctgtcatgttcctggcctctgtgctggacagttggggaacatagatgacccagataaagttcttgtcctcaggtagcttacagtcaagcaacttgaacatacataacttaaatttttgctaggaaccacaagtgtgtaagaattgaaatgtcacagcttggtaggaaactagcaaggggtggacatgcctttctctctgcatttctagcgaagaatatagaaacttctttccaaggaactccagttactgcgcacctgctatgcaccaggcactgcatgtaccatacccacaacacacaagtaactcatagaccattgttaaatgctcccatttggcagattagaaaaccaaggctcagtgagcctgaggaacttgctaaaaatcaaacggcaagaaagtggcaaggatcagagagaaactactgtaaacacctctctgaaaacagctttccttgtagccgtgtcttggctttcctacttaaattgcatttacttttaagattcaatctttcgatgccctctgaagtggacctcccctggttccctgaagaccaaatcaaataactggctgtaatcaatcattgtatgggaatgcagaatttggttaactaaatgttgtgcacatttgagatgcctcatggcatgtgaggacaagcagacttaagagaatcaaaatacagttaaatagacttcatatacatatgtgcacacacacgatccccaccctccccgcccgccccccaacccaccaagcagaatgtcagtttagttcattcatgattccggtggcgtcctgggttcctgcgtggcccctgggtgctgattgttgtcagttacctttccattacagccgtctgaaggaagggctggtgtgttaagagttctcattgatagaacatcagataaactgcctcttagaaaggcatatgtatgtttaaaatgaaaaatgtgtttcttacaaatgtcctgtgaaagcactgaggctttgtgaaatggtttgccggtccattcaaatacaatgagtgtgttttaatgccacatcatttttgtcagtacaaaaaggtaaatccaattaaaactgattgggttgtaacaaccaggtagttctccagtttactgcctgcctttgtagaaggaggtactgtccccctggtgtccccagcatactttttgtagcctcccctgaatgctcgtgcttcaattcatctgctgtctcacttcatatcacagggacctacctatatgtctgcatcccccagtgttctgtgcgttccttgaggacaggtgccacaaccatcttacccactcctgtcccaggcgtttgtcacagggcctgacctattgaagaagtggaagtcatatttttcccaggagaccaaacagtgcttgcacagtcttagagttatgaaagaacacagaacatttagaaaacttcaagtaattccaaagattgagtaggcagtgctgggtcacaaacaaccttgcatgccttgccaaggggtaaggacattgtccttcagatgatggagagccgctgaaggtactgagtcaaagggtgacatggtcagactcatgttttaggaagatcctgcagctgcttcctggaggacgaggtaaagaggagcctggaggccgggccagcattttatccagttcacttttcctcagttgctcatggtggctggaattatgcctgtggagtccaggaaaacatactctttagcatttttcataccttttcctccgtatcttagcaaaataagtctctgtaaatttggactactttttaaactttaaaaaaaaaagtcaccttttattttagattcagtgggtacgtgtgcaggtttgctccaggggtatattgtgtgatgctgaggttttgggtatgaaggcccccattacctaggtaagtgagcattgtacccactaggttatttttcagcctttgccctcctcctcttccctctctagtagtccccagtgtttgttcccattttcatgtccgtgagaacccaatttttagctcccacttataagtgagaacatgtggtatttagctttctgttcctctgttaattcacttaggacagtggcctccatctgcatccatattgcagcaaaggacatgattttgttcttttgatggctgcacagtgttccatggtgtgtatgtaccgcatcttccttatccagttcgccattaacgggcacctatatcgatcccatgtctttactattgttaatagtgcttcagtgaacatacaagtgcatgtgctttgactgcatttgaatcagggatttgccttttttccagttcttttgctcttgtctcttcttcagcaagtcccgaacttggcctttattcactgttggtctgcaaccctggacttccctgatttttccagtgggtgagaagatgtcaataaggtccttgcataaaccgtctggagtgtggaggagagagcactggcagtgtctcctcctcccccagataagccgtggggaaagatggtttagaatccattcacgagatggaaggatgggttagaatccatgcacgagatggaaggatgagttagaatccatgcatgagatggaaggatgaattagaatccattcacgagatggaaggatgagttagaatccatgcatgagatggaaggatgggttagaatccattcacgagatggaaagatgggttagaatccgttcacgagatggaaggatgggttagaatccattcacgagatggaaggatgggttagaatccattcacgagatggaaggatgggttagaatccgttcacgagatggaaggatgggttagaatcccttcacgagatggaaggatgggttagaatccgttcacgagatggaaggatgggttagaacccattcacgagatggaaggatgggttagaacccattcacgagatggaaggatgggttagaatccattcacgagatggaaggatgggttagaatccattcatgaggcagggggaggaggaaacttactggacttcagattttacaggagcacaggaaaaagacatacaccctgaacagaggttctacctgtatcaattcctgttgtgcgactcgcactcaacaacagtccccttgaagggaagtagtaggcttcagaaggcagctgcagtttcctgtttatttcctgcctctgtctacagaaatggatcacattcctgaagcttattcaccacggggaaagcgggattgaaaacagctcaggctctggccctggggcactgaggtctgcatctcccctccaccactcataagacctggcacaagctgtgaaggctcttccagtcctagtttattcatccgcaaatgagtacctcctggatgtgtattgtaaaattaaggaggacgagcacttaacacttggtgagcaacaaagggaaatctttctgcaattgttattatgaagcattttctcatgagtaccctgactctgggattccttcccccaaatcaccccccagttcattgggcaaagacgtagggaggagcattcctggcagagggtatggaatgggcagagatgtggatacagaagtggatgatgggccaggcacagggcctcatgtctgtggtcccagcactttggaggctgaggcaggcagatcacctgaggtcaggaccagcctggccaacatgacgaaaccccatctctactaaaaataccaaaaaaaaaaaaaaatagctggacattgtggtgcacgcctataattccagctactcaagaggctgaagcaggagaatctctcgaacccaggaggtggaggttactgtaagcggagatcgtgccactgcactccagcatgggtgacagagcgagactctacctcaaaaaaaaaaaaaagtgaatgatggactgagcccttcccatggggcaggtactgtctgtgctgagcatagaagccacagagatgaaccctgcataccgggcctctacttgggcttgcattaagcagtgaatacttacttagcaccttctatgtgtcaggtcctggaggaacagatgggaattggactcaatgcctgctcatcccaggactacagccatggtcctgaaaagcactgtccgaggtgctgccccatagtccagatgctggttctgttggcagacagatgatcaccagctgcagcagctgctccaggcatgggagaggatggttctgccctgaccccgttgcttgacagaaggtcctttccatctccatgtgagcctcctttgttttccagggtccgctggtggttggtcctttggggaacccagaaggcccctgcttaaccccaccagcctgctggaggagccaagagcctgccagctctgcaagacatcccaactccatcacctttgcaatttccttcttcctccccatgctcctggcagccacaggcttggtttctgtgcaatgatgtgagtcttgggcaattcttagagaagtctcattccgtgtagtttgctttctgaaattaaagactgaaaaataatcctagagtgaacaattccatatctgcaaatttgatcctacagaaacctatcatgcccacatgtgaaaagatagttattcaagggtgttcaatggagcagtagttgtaagggggagaaaatggaaatgacctaagtgtccatcactagggcattggctatgcccattctttttgtttgtttgttttttgaggcagagtttcactcttgtcacccaggctggagtgcaatggcacagtctcggctcactgcaacctccgcctcccaggttcaagcaattctcatgcctcagcctccgagtagctgggattacaggcgcccactaccatgcctggctaatttttttttttttgtatttttagtagagaccaggtttcaccatgttggccaggatggtctcaatctcttgacctcatgatccgcctgccttggcctcccgaagtgctgagattacaggcatgagccaccatgcccagctggctacgcccattctataggatcctgtgcaaccgttaaaaggatgaagtctgcctgtacgtgctgatgagtgagagaagcagcataggtcattacacaaaaatccatgtatatacatgttcccgtttatataataacaaatggatataaatataatagcatctacctcttagggttgtcatgaggattaagtgggttaatagatgcaaataccacataggaggcattcaagtgttagatgatgatgatgttgctattgctggtatttcagtctttatcttgctgtgatctaagctttcataatgattttaaaggcataggaaagggttacaataggccctgccattatcttgttttctatacattgggttgatcacaggagggtgagatttttgcctctgtggagtgtgcacttctcctgtggttacacagccctcaatggagccatgtgcctggggtcaccagctcatcttcatttgctcaggaccatccagttttaaaactaaaagtcctgtgttgtgggaactccctcagtcctgggcaaaccaggacagttgacctcttccatatgtgcctctggtagcccagttgatttaagaagtatacagacacgtggtcgttaatgtttttaatgtgtaacagggaaaaaaataacatacaggtggtacatgagagagtattattcagccttaaaaaggaaagaaattctaaggtatgatacaatatggatgagcctggaggacatggtgctagttaaataagtcagccagcaaaacacaaatcctgtacaattccacttatgtcaggtacctagaatagttaaaatagcagagaggaagtagaatgggggttgccaggggctatagaagagagaaatagagaattattatttaacaggtagagagtgtcagttttgcaagatgaaaagagttctggagatggatattggtgatggttgcacaacaatgtgaatccatccagtaccactgaactgtacactgaaaaatggttaagatggtctacagacatatcaccctgaacacacccaacctcgtctgatctcagaaaaatggttaagatggcaagactctgtctccaaaaaaaaaaaaaatatttgtgacatcaaatatcacaaacattggtgcataagataaagctaaagtagaatttaaattaaatagacatatgaaataacttaaagattatgggtacactagaagcagaagttggggaaacactgttgtagtctattctcagcttaggttgaaagcacctcaaccctcaacttcctcaacttgcctgacttcacagtccctcatgcaccagcatagtctttctttttttttttttttttttttttttttttttttttttttgagacagagtttcgctcttgttttccaggtgggagtacagtggcgcgatctctcctcactgcaacctccacctcctgggttcaagcgattctcctgcctcagcctgggatcacaggcgcatgccaccacacctggctaatttttgtatttttagtagagacggggtttcaccatgttggtcaggctggtctctaactcctgacctcaaatgatccacccgccttggcctcccacagtgctgggattacaggcatgcctggcctccccatagtctttcatgtgtgtttctgccccacaatgggtcgttcattgcagtccaggaggacttactccagtgtcccctgggctctgtgcacacctggcagcatcagaggtttgaaatcctgaatcctgacattcacaaaatcctgcgtataactttggctttagtcctgtcacctcaccgttgggctgtgagcacctctggcagggtccttgacagtatcctgcagtcgggaaggggttctggggcatgagtgccaggtgggcaccgggagcccagagaggtgcagttggctttgtgttgggctccttcctagtggaagctgagcaggcttcatctcttgtcacatgccaccagcaaacaggcattgtgtgcctctgtgtgcccagggcaccttttccatacagcctgggctcctgggtgctatgggaacctgagaactctgccctctcttccttcatatcttcatgtccagagctgttatatagataagacacacacacaatggtgccatggccctctgggagccagtccctaagtctgacaccagctgggaagggaccttggacaaatccccaggaaggggccttggacatctcttaaactatgctctgcagaacattccatgggtcttatgcacagaaagccttccaagttcaaatcaggttgggtctttacactgttttccacagttcaaggtgtcttaagcttctgatgttcaagatggtaataataatgctattatataatagctgacatttatcaggggattactatatgccaagtactgtggcacagatattaggtgcattgtttttatttaatactctcaagacctaaggcttattgaaatgaaagtaattcattcatagtccgggttctccagaagaaaccatgaggagcagataaagatggaaagcagagaattaactactcatagtcatacatgacttacagcaatgcttctgaaattttaaagagcacatgcatcatctggaatcttgtttgaaaacacatttttgctcaatagatattgggtgagctctgttgctcaataggtattgggtggggcctgaagtatggcatttctaatagcagtgggctgcagaccaggctatgaagaggaagacattattgcgcctgtattttttttcttctgcacttgaaatggaatacattcattcattcattcactcgttcattcactatcatttgtagaggcagtctcgtagtagagaacacaagctgtgacatttgtccccaggttccagttctggttctgcactttactaaatggatgatttatctaagtctcggttgcccgtccgtaaaatgagagtgaagtgaaattccttttttttttttttttgagacagagtctcactctttcacccaggctggagtggagtggagcgatctgtgttcactgcaacctccacttcccaagttcaagcaattctccagcctcagcctcctgagtagctgggactacaggtgtacatgcccacacctggctaatttgtttgtatttttagtagagacagggtttcatcatgttggccgggctggtctcaaactcctgacctcaagtgacccacctgcctcggcctccccaagtgctggaattacaggcatgagctaccacacccagccaaaatttacattttttagcatcattgtgactatcaaatgcaataaaatgtggcaaaagtctttccccatggcctagggcatggtgcacatttagtaaatggctgggacttgggagattattgtattactcatttttttattcatttcgaaaaagattctcatatggctcccagtaagtttattttaacatttatttcttacttatttcagcagagacttcccagtgactcccatggtggtagcaacaggccccagttatcctcaggaagcagaggaactggcatagaccaagagacatgatttctaatcatttcagcaaaaagtaggaggaaattgataacgagatagatacaagagatgaactatgggaaccatttggcaaatgacttcaccagaaaaagagagtgagaagcgtgtgtgagtggaagagagagagagagagagagagagcgcgcgagaaactggaacggggtaaaatgtcaacagatcgcaagctgttaattatctggagagaactaaatattatgtaggcaattatcgacaggcgtctgaaagcaacaataggagaatttggtcctcagccaaattccatctccctttggagaaggactggggggatgggctttagcattcagagcaagcatttcacacagagggagagcgaggggcccgagaccctagcaaggggggtaggcaggggtccccccgccccacccttccagacaatccatcaggatcctttgccaagcacacagcgcttggctttgaaaggcggctttgcccaaaagctctgggcctggaaacctcagccccctcctcatccaccctccctcccccaagatgtcatcttttgagacgatttcatgtggaagcatcgctaagtaaattcgctaaatgcctattcatccccgtcagatggggactcggtgaagcggtaaatgtgaaaatggccccagctcacagccctgaaaggcgctttctgggattgccaaatggaactgcagccgctgaccctgggagacctgaggcttcacgagaagggggcccaggagccccggcccggccccttcaatcctcccactaagggtgtctgagagaccttatttattattccaactgccggggacccattcagaggttaacttgtctcgtattcatcaggacaacaataatgaactgttgcggagagtggtgagggggttggtaaataagagctgttaaaacgcagttggaatgggcctctttatggtttggagagaaacattgcttaaatttttttataggccgatttagtttccacctctcccagcgacttattaaagaggctctgtccccacaaactacaggtaacagtgtcggaggcaccagtggactttaccttggcatgcacgatggggtttaaccacgcgggagatgcaccattgtagggacacgtggggttagccctttgcgagcatcccctgggttcacctctgtgcccatcagcaaggtttagctttccgtgtgtgtgctgtattcaactccctgcagacacacggggtgtttctggtgcctgccgctgctagaatggctggttttgaattggtgtttatttcagtaataggatgggacacgagcagcgctcattttcactgctgcctctcttaactgctttgtgccccctccgctggaattatgagtaggtcaacatgagtcatccaatgagagaacaggggcttggagtggcgagactgcagaggcgcagggaaatgaaggagggggtgagcagtaggggcagctcagaccaaagagttgggaggcagagcaggacgacgtgcattgattgtgcccctactgtgtgccctttaaatccacccagttgtccattcagtatatatgcatgatgggcctactaggtgctgggcatgtttaattttcaacctaggcgcattcagagaaagctgccattcagtgaggttaaatgacatccttggacacacagctgactcagtcatggagctgggatctgtccccagatctttctgtttctgcccaagcattgctttctaaagcactgtcctgcttctcgaaggtctagcttctattataaccccagagatgtttttttatctttctgctctcttctctgttcctcccatttgaaacaatagttaacgctttcctttgaagtaaaaattccgaagcagagaaggctggtgataaaggagctgtcacatcagcaccatttacctgtttgggtttattcagcagaagaggcgactgcgtttctggcagatggagacccgtgtgactgccttttaaaatactgtcacagctgtatgcgcaagcggattagctgtgattacactgctagtgctgagattgatggggataaatttgggataacaatgctggcaacgatgtcactcgtttgtattggacttcatattttttaaagctctctcaatcagtagccccgtggttatcgaggacttggtatccgtccattcattgatgcattcattgctcaaagtgcatttgaaggagtcagtttgaacacacatcactttgattcatttgtttattcaacaaatattaatatagctcctactgtatgccagtgttgaacaaatccagctgggctctgtcctcgtggaacttacattctaatgtaagcaaggtcagtgctttcagctggtgatacaagagtgaagtattataaacagagtgatgtaataaaggtggggagagagcgggaggcaggtactactttaggttaagtggtcagaaaaggtctctctaaagaggtggtatttgaaaggacacctgatgacaaagccaagccagcaatactgggagaaatttcccaggcaagcaaatgcaaaggtcctgaggttgctgtgcatttagctttgggctgacttgctgtttgccaagcccagtgccaggcactggagattcccaaacatgtggagcaccacacttgccctcacagagtctccagtatattggagtatagaggagagaaatgcacaaacagcccattttaacatagtgtgatagagtcagtgatggtgacataaaaatggcgatataaagaggatgccttatcagcctgtgtgcaaatgatcagagaaggtgcttcaagcagactgacataattggtgaaacttgctttctgtgacaaagacagtacccacggtgtctggcctgactctccccttggtttgtttccacaggacaaatgaccagttggtggcgtttctctcccgataccgagatatgaatttcttgaagtcacacggccgggacaatgcaaggtagcacctcaacccctacccctgtacaaaatggaaatgaaaatctgagtgatcatttggggaattttctaggctggtttcatgcagccacagaaaggttgagggtgggagaaaggcttggcaccagctgtccttcgctgtgtctgcgtgggatctgaagtagtcccttctgtcagccaaggacaagataaccatagatgtttctcatggtgtgacagcccttttgattacttcccccaaggacttccacaagtccaatatctcattgcagcaaccctttcagtagggcacccacggttaattctcattttattgatgggaagactgaggcccataatgtaagcaacgtccccagatcgttcattcagtcagccactcattcaaatacttaacaagcatgggcgtgtgccagttgctgttctagccgcaaacaagaccaagtccttcctctcagggaattgacctgtagtggaaaagagtgtcataccagcatggacttgaacccaggggtcctgatcccagccccatgtcctcctcactccctcactggtgtccaacacatcagcaggggtgggaggcacccagaaccccaacccagatccctcacacctctctcgcttaaaatgaacaatgtcaaaaaaatagcatctctacagttcagcactgagctgagcccaagtctccatgatggtccatcaactggaagggatacagtattgagcgccccctgtaggtgacatcacgtgatgggattcctcattccaatagaaaataccattaaaggccaggctcatgcctgtaatcccagcactttgggaggccgaggcgggcagatcatgaggtcaggagtttgagaccagcctgaccagcatggtaaaaccctgtctctactaaaaatacaaaaattagccaggtgtggtggcacatgcctgtaattccagctactcaggaggctgagacaggagaatcacttgaacctgggaggcggaggttgcaatgaaccaagattgcaccactgcactccaccctgggcaagagagtgagactccatctaaaaaagaaaacaaaaaaagaaaacaccattaaacaccagtccagggtggctctgacatcccggggtcttgttctagcattgaacctggcagtgcttgggatcatttcagcttgttaacgtgcatggtttagctctcagagtgttttgttttgtcttgttttcattcaggtgcttcatttgaaaattaatagccccatttaaaaacagcagtatttcctatgaaaatccagatttctagccagtcttaaaaaatctgaaggtccattaagtctgtgcctgaattttctcatggcagttatttcctggatcttaggtcgctcggtccttgcctgtccccgttccccaacctggcccccgaccacatctctgtttgtaatctctgctttaaatcttcactgctgttgttggtgggagtgtcattttggctggctctgtgacagtttacccagttatccacagcatgggaggaacaaaagcaagcaggtagctccgtctcctgagctttaaagaagtaatctggccaggtgcggtgactcaaggcctgtaatcccagaactttgggagggtgaggcgggcggatcacctgaggtctggagttcgaggccagcctggccaacatggtaaaaccccatttctactaaaaatacaaaaattagccgggtgtggtggtgcacacctataatcccagctacttgggaggctgaggcaggagaatcgcttgatcctgggagtcggaggttgcagtgagtggagattgtaccactgcactccagcctgggtgacagagggagactccatctcaaaatagaaaaaaaaaaaagtaaccctagaatccttgtgttgtatcatttttctaaattgaaactttgatttcattctgctatttatggattgttcctgcccctactcacagcctaccttctttacattaaaaaggaggcctctttctgcaacacccgaacttgaagatgctctgtaaattagcacagattagtttactacgctcaggccactaagagtacagaggcctggctggatgagtaagaagaatcatggccactgtgtattgtgttcctactaagtgggccctttttgtataggatccatatttgttttcacagccactcaatgcagctataagaattattctccccatttgtcaagcttctggagtttacctgatttttctgaagatcacacagctggttaaatgctagaatttgaacccaagtttttctggccccatagctgcaggagcaaagtggggctgggcaaggattccatggaggtggttaattgtcagaagtggctcagacattggtattcctcgccctcaggtagagaaggaaaaacccttcttcttctccaggtagcagctaataggtgatttgtgcaaagttgtgtctcgagaaaggagcccattgtaaatgtatcaacttgtgtgtgaattacatccaccctagtattaactatttcagcctagtcaggatttattctctgagcactatttgtcaggcactgtgctaggaactgagtatagcacaagttaaaaacagggactgtgaggttacaccttctggtttggaattctgatctactgtgttctagctgtgttgcattggacgagtgacttaacctctctgaactggtttcataatatttgaaaatattaatagacctatactcatttattcattgagaagattaaatgagatgctgcatatacagcatttggcatagtaaatgtttatgatgatggtgatggtgatgattatgtcattgttatgataagcatagaactaaattgttgctggtaggagaaagaaatagatggagaatgggcctgaattttgcctctaggtgcctgagtacattttgtataattgatgtgcatccgtaattgacaggtggtacccagatgtcttgggacaacataaagaagtctcaggctgaggaaatgcttcttacacctccctccaagaccctaaaacccaaaggcctcttgacagaatagctcacaacttccaactcttgcgtgtgagtccccagctgggattttctcatttaccggaagttagggcagtgattcagcattaatttaatagtaaaacaagccaatgtcccattcactggccacttccctctttgttagctgtggcctcacctgctgcacgaataagcctacctatagcccatcatccatggtccctcccaagtgaccagagctgggcgtggcttgctcaagttctttcactggtgatgtgttagggagaactcttttggtgggaaatgacagaaacccagctcaaactagcttaagggtaaagaacattaccagatcaggtaactaaaacattagggctgacttcaggtatggctaaatcaagctgtgcaaattatatcatcaagcccagactctctattagttctgtttttctgtgtgtatgtttaattttctggcactgggtggggattattggcaatatattagcctccttttatagataagggaactgagactcaaaaagatgaagttacttgctcaaactcacagcactagggcagcggggaggactcacacccaagtgagtgttcacagagtccaagctcataattctcacgtgatgaagcctctctgtgttctaggcctgctttcttccaatgcactggtgactttgaggcagctactctgcttctcttgacttcattttctccctttgaaaaacaagggggttgcatgagaaagtctccaaattcccttcccattctggtatttcatgtgtccagaccagccctggtaaaagaggaggtgacagaggcagagatcttgaaagacagagagatggggatgaacaaaggcaagcagtgaaatacagaataggccacggggtgcctcggtttttaattccacgtagctcctaatagcaatgttgaccttctgtcttcatctccaacctttagcagccaatttggacttctggctcccactgtgaagagatggcataaaggcaaactagtattctaatagctgccaaattggtcctgattgtttctgttattaaatgaaggggagggttgtgttcactgtttctccttgctttcctccaaaagtaaagtcactagatacattgcaagacaggtagcacaattgtcattttcccaggcagcctcagcagggcttgcagaagcaggtggccgcatgtttactctcagcctgaataatcaggtatttggaaacatccctacaagtccctggccttggctcagggagcatcagagaagtttttcaaatctctgaaacctgttcaagtctcagtgtgtggggacaggcctcttccagggagctggaaagtgaaaatcggagtttttctgagacttttccttccctggttgatctaatttctccacttcatccagggtcaccagggcccccatgttagccctgggacacagtgtgtgaagtgccagagcatagatgctggagtccagccacctgggtcgaaatgccagctcttctataccacagccatgggatgtcagcaaatggcttcgacaggccatgcctctgtttctccatctttataaaattcaaataatgatcatgggattggggagatggagcatcctcactggccacaggaaggccccacgctgggcgcattccaggacattttctcatttcaccttcatttagcaggtgttaccccatttcagaaatgaatacagctgaggtttgagagtcgctttaccttagtcaaggccctacagctagtgaacgacagagctgagatggaacctggttccgtctgactttaaggcctgtgttcttttattactccatagtgactgcatttgagaggacctgcaggtttacgctctcgaggtgtgcagatgaaagaaaatcctgctgaatgtaaatagaattatctttttgcatgggtgagggtaggtccttcccctacttcctagggtcagcattttgcaaagtgtgtttatgtgccaccaggacatgggggattcttttgggtcctttataagtgggcatgctatgaaagttaggtattgatcttatgtgtatcaacaaatttataaaattagctgctccaaccatgacttatggatattatgcttcgaataaggctacattgaaagaaaacagttgaagctatttaaagttagcttagaggccgggcacagtggctcacacctgtaatcccagcatcctgggaggctgatgtaggaggatcgcttaaggccaggagtttgaggcttgcaccactgcattgcagcctgggtgacaaagcgagatcatgtctctaaaaataataaagttggcttagagcagaatattaaggggcctcttgtataggatgctacataaagcacatagcatagcagttaagaatccaggctctggagccagactgtcaagattcacgggccaactctaatacccactcacagtgtgtgaccttgggtaagttacgtgagttacctgtgtatcagttttctcatctgtaagatgggaatgaggataatcataccaatcccatagagttgttgcaagaattaatatatggaaaagcccttggggacagttagttgcgcctattaagttgatgatgatcacaatggtggtggtagtagtggtgataatgatggtgttgttgatatgagaagaatcttgatgataatatacacataattaagatgttacaaaaatgttcaataactcttatgttcaataactctcatgtccactggggacatgggagattcttttgggccctttataagtgggcatgtgatgaaagttaggtattgaccttatatgtatcgacaacaatttataaaattagccactccaacccatgatttatgggtattatgcttaaagtaaggcaaagcatagtaagagaaacagctatcatttcaaatataagaaagccaggcaggtagattccagccccaggtcagaagtggtatagagaagtttctctctcttctctggtctgaaccccatctgccagaggcagcattctcctattggaggccgggatggcatctgagctgcctccctagctccccttttctgacattgaactaatcatcagacccaaacctcctttgatgtataaacaagcaaatgtttaaacaaaagttggcaaatcagtcgagagcctggccaggaacctcctccaggcaaatccgcattcgggaaggcctttggtgccagcttgcttattgagagaagagctctgtttctggctaacttgtagctccatgactgatgcaaggagatcattaatatctcatctccaatagggaaagcagattgcatttctcttttgctttccttaaacccaaccgatgcgttcatgactgtttgcatgttcactttatttaatccaattatagcagccacgtcaaaataaagtctggcattatgtaggcacccacacaaaactgcacacacatacctccctgggcctcagcgtgtgtttttaggtcatctttagaacttttcttctttccaaacaatacacaaagaagttagacaaaagactagaggggaagtacattcccagtgtcatctctgaaaggtagagtatgatttttattttcttctttgcatttttttatgttccaaaccatctatcaaggctatgcattccttttataatcagaaaaaaggcagtaaacaatgttttcaaaaatacatgaaatgtggaaaaccaattagccctcaacagacctttagacgcttggcgatgcaagctgattcagtgacgtgagccctgtgaagaatgtgagccaccaagcccaggtactccagcctcaggattcaggccactgactctgcatttctacttgagcttctttttctgccctccttgggaaatataagaaagccaggcaggtagattccagccccaggtcagaagtggtatagagaagtttctctctcttctctggcctgaaccccatctgccagaggcagcattctcctattggaggccgggatggcatctgagctgcctccctagctccccttttctgacattgaactaatcatcatccttgaatgtcaaacctaagtcagctttctccacacagggcagcaataataactggtacatgtgccactgattatcctaagcaccttacagatattcactctttctacaacaaccccatgacataaatgcgatcatcatcgtgcccattttccagatggggacactgaggctagaaagattaaataacacacagctcataggtggcgagacagacttgaagccaagcagagtgactccaaagttggggttctttttatttttctttttgagacagagtctcgctccatcacccaggctggagtgcaatctcagctcactccaacctccacctgcaaggtacaagcgattctcgtgtctcagtctcccaggtagctgggattacaggcatgtgccaccatgcctagctaatttttgtagtttcagtagagatggggtttcgccatgttgtccaggctggtctcaaactcttgagctcaagtgatccgcctgcctcggcctcccaaagtgctgggattacaggcgtgagccaccacgcccagcctgaagtcagggtgcttaaccaccatgctgcactgactccctaagggtgctgactgcggagtttccctccatatccaagccacgtggacttgtgggtggtatgtcccttccaccaatcagatcaagtcggcccctatgaagtgaggttctgaagctgaggacttccctgtagcttcctttggcagccacagggcccttgcactttcaattttctgtcactcataaaggccttccccataactccttagaggactgattccttctctttgagcttgcatgccacctgctcctcagtgaagccttccccaatgatctccactaattaagtccctgtctctttattttctatcattacccccatatttgttcctatatagcatgtaattttatatttgtgtttcatatttctcgatgtctacttacttattagaaccttgtggctagagtgtggaatgcagagcctgacactaaggcttgattcccctcattgccactcaccagctgtgtgggtcttgggaaatttacttaacctttctgtgtctctgttccttcatttgtaaaatgagccctcatggggttgcagtgaattctaaacagaagaatatatattaagtgcatagaacagagcctagaatgtagtatacgctcaataaatggtagctgttattatttacgctttttgtcttgcctagaagagagagaagggcggggtgatgtccattttatttaaaaccattttctcagtgcatagagcagagcctggaatatcgaaggtgctctctagtgctgctaaaggaatgaattcctcaagcattcttgatcttccagctactgtaggatagaggaataacaattgactccagctcaggcccagaaggggcacagcctaccgtgggcctgagagaaatggctagcaggggccctgaggaactgccaaacttcaaaatcagggagctgaatcctcgcgagctcatccagagcttggacagaattagaaggatggccaggacacttgtcaccttcatgccacaatcatggctattgcacaactaaaacaaggacttctgtccttggtgctgaaatatcattgctctgccagactaaaggatttcttcttagctgtggaggtgtcctatgtacctgtctaccaaatcccagaagagagaataggacagatagaaattcaccctgataaaggaaaaaaacataaagcatcgtaatggacattatggagcccttactatgtgctaagccctccctgtatacaatctcatttgaatcatcacaccagctctgtgaattagctattatgatcaccatttcccctgtgagaaaccaaagtaccatatgattaaagttgcctaaggttagtagaagacacaagacttgggccaagtaatctgattccaggactcaaaatcttgccactgcatcccaatagaataatatttagctgtgactttgtgccagtagagaaaaatctcaggcagctaaactgccctttcctgagagcctaggaagagatgtgtgagcctgttcacatagctgactgatttcatgcattgtgggtctatatgatttattccatgactttattttttaactaaaatccttaggttgtacttatgctgaaggagtaatctagattcaatgacagattaccagacaggaaaacagaaaagggggagattttattttttctaggcattgtgactttggatgtatcatttgtactttcattctcaggttgttttttttttaatttgtagcattagctatattagctgcttgtgaagattccttcttgctcagacatgctgtaaacttgaagagcagagttattccttctaaaacttacagtgggacagcttaattctggaataattccatacttgatgaatataccaagattgtagccagtgaattaactgaattgagaaacttctttgttatccacctttctgacattatttccaaaagccacagatgtttttttaactgacttcttctcccatgggggagaatcaggacttcttcccaccctctgtctgatttactttgatgctcagctgagtagatttggtccctgggatgtcccaataggatcatatttagctgtgactttttccttagtgtgctaataggtaaaaatatcaggaaggtgagctgccccttcctcatagcctaggaagtaaaactgaatgcaaatgatttcatatttgacctcaggtagaagacagatatcttccagaggtctggcagaaagattcttccaaagccaacaataagcccttctcttttgattctctctcatttctgggcattgtctttttcaagcattagaagatcacagatccgttctttctatctttttggtgggactatggtgaatcggggcatcaaagatggcagagtagttaagagcttgcattggatccagctagacctgcatttaaattcaagacttctggctgtgtgaccttgggaaagttacataacttttctgagcttcaattttcttttctgttaaatgtgtgttagaaggatccaatacctagttaacgaaagtctgtgactgcctgattgcccaacaggtgtggctgttacccttctttttattcattttttcagtaaatatttattaagcaccagttgtatggtaggcactgatgtaagcagtagggatacagcagtgaacaaaaataggcaaaaatctctgccatcttgcagcttacatctagtgagtggaaatagacaacagactaaataaatatcttgtatattgtgttagaaagtgaaaagtcctgtggagaaatacaaagcatgaaaggaggattgaggatgccaggcatgggggagggatgtcatccttaggtaagaagggattgatggttgagtcggttcattgcttgggtgaacagcgcttactaaacactttgcaaggccctgtgagaagcatcatccatcacactttgcagctgattcaggaggctgtcaagacacaggtgtcatggggcttatcttacagatgaggaaactggcattcagagaggttaagccagccccacatctcatagcctgtgaatgcagaggcaggattagtacctagatcacccaatgtctgtttgctgtagtgtcacctgttgccccagttgccccaggtaacctactcaatgggaaatgaaaaggaagagcgtatcattggtcaccttttgtatatggggcttattgctacagatctgtgcttcacgcctcaggtgagagagccatgcgccccttgttggtgagccatattttataaaaagtcactcaggtgttcactgacttaccttgccttccaattttaccttttcaagttatggtaaagaaagggaagaaaaaatgcaaatccctgcccaaacagctgatgcctctcccctggtagataccctgttgctgggcctctgccaccatctcctagtccaagacttaagtccccattcacccctgtgactccagaaacttttctgagacctagggaattggttgtctccatttactcttagttaaccaaagcatgcgtttgcagcatatcagtttttgaatgtgataaatacagcaacccatctcccaatcccatgaatatttcattttggagatgactgcataaatattgtatttgaatattatggtccgggacatcacattaaaattgcaagacgatgctattatcccatataatggaacatgaaattaaaaactggaaagaaaaattttgctagtcctctcacctgtatttcttctctgtctgtctctcatggttagtctggtaaccatgtaagtttgaatacaaattatctaaaattgaaagtttcaagcatggttaagtgcatcgactggacatttttgtataattagcactagccagagtcaaggcagggttttattttcctaaactcaggggcttcctttgatgacccagttagagctcagttacatttcagtgggttaatactgtattacaaaaaatcttcgctgagttccttcccagcaagaacatgactttgctaatgagcttggattatctgtcttccattgtctgtctgacccctatagggatttaacttcacaacccagacctagcccaattttgtattttaccaagggggaaactgagacacagagaggactgctctgtagcaagaacatggctttgctaatgagctcagattttgcatgtggaaagatgtgttagagaaagagcaagacccgtgacataggacagctgggtcttttgattggttctacccttgtgttgagtcctctgtgtgtccttagaaaagttgccagtcttctctgggctcccgtgtatccatatgagatgtattgcttgccccatgcccttttcctgagtataacaatgtgacttatagaatgtcaaagctggagagtaccttgggaattacctaacccaggattattgtgactggaccgatggcttatgggctggattcatcctagagagatgttttattcaaccagaaatgcttttttattttaaaggagtggaagtgcatttcagaatgtgtgttcttcacttctctgctaatttcatcagtccttgttttttcgtattcaggctgcttcacacgcttccattatctgtctgaccgccctgtagggatctaactttacaacccatatctagaccaactttgtattttaccaagaaagaaactgagactcagagaggactccttaacattttgaagtcacccagctggtgacaggtaaaaccacactgccccacagatgaaaagcacatttcagccgaattaagtctgttccctgccagcgttaccgtcatcgccatttcattacaccatcatccattttgtgatgacttaggtgtactatgtcattatcttccatagtagccaatgtctagaggtgggttttctgctcatgcagaaaagaaatgctaagaatgtaggtttactaatgaggtttcaagtaattcccctgagtgaatgtcagtggatttgtgggaagcccggtgagagggaattctttctggaattcagcgtgactaccagggcaggaccatcttcagcttccaaaccctgaagtctcctcatcacagtagacttttcttgagcagctgacctgcactgtcctaggacctggaagggaggcacaaagtccagagccaaagtgtgttgtagtgagaataaaggctacctgcgaggagacaggtaactccagtctgaagacagagtaacgaggtctgttgcagaaatgcagacagctctagaactctgagcagactggctcagtggaagaggaagcatttttgtgccacagccctggctacctgccctgtctggagcctaagaacctccccacacatcatggttgtgattaagttgaaatcattcaggcatgtattaggactttttcaaatgcaagtgaggaatctcatctcaaaaatgccttaagcacataacacacaagtctgggagagggtcaggcacagtgagatccagaatctcaagtgaacccatcaagcgcttggcactgtgtctttctgtctcctatttccagtttgctccattgtcagacaacctctatattcatggtgatgagatggctaccagcagccctaggctgacatcctccctgccagaaatctcatagaaaagcccctccttctcactaactccagcaacaatccaagacctagtctcagacccagcttgcattgctggcccatccctgaattgattatggaggccagacagatgggatgctctgatccatcctgggtcatgttcccaccccctggtgctagggtgaggatacagacccaagtaaactgagatttaaggatgagtccaaagtaaagcaaaatgtggttcccagaaaaatcataaatggatgctgagcaggcaaaaacaaggcatggagcaccgatacctgctgcagcatggatgaacctggaaaacattatgcgaagcaaaagatgcagacacaaaaggccatatattgtatgactgcctttatatgaaatatctagaattggtaaatccatagaggcagaagacagactgatggttatcaggggctagcatgaatggggagtggctgtgtaatgtgtatggggttttcttttgggggctgatgaaatgttttgaagccaggcagaggtgacagttggacaacattgttaatgaactaattccactaaactgtacaccttaaatgcttaattttaaaccactgctgttacagcagagcccctgatccccctccagtctgcatggagcctgcatggagtaggcactcggtgctgcctgtagcaatccacacagcgcctttgtggaaaatagaaaaggcagctcttcctcgagacacttagatccccttcatcataaaatcatttcttggtctcttgttattttacattgtgtggatgttatctttattaaaaatgtatgaccttttcaatctgtgtcatctgcccagagcaatctcccaattaagccaaactggtctgctccccagatctctgatgagtctgttttctgtctagaatgtccatttttctctcctccctgcacccctcctagtctgactcaagccctgcctcatccatgacgccatccctgaccaccaaccaagtccacagcatgctggcttttcacccttgccctagtccccatttttccagaagttcctcgaaactcatttaacctatggttatatgtgcctgtatcatatttgcccagtcagactatgagttcctagaagataaagcctgtcgtttatagtgtttcctgtctttcactgtacccaccacaaggctggggttgtggtaggtgctggacatgtatttgcctattgatggattcagtatctatccattctgtgaatactcgctaagcacttactgtgtgccaggcacagagtgatgagcaaaaacaagaacaaccctagctcacatgaagcttgtagtctactggaaagggtagacagtaatcacagaatcacagaaatgtgctatggcaagttgctgagttcatacacctgtaaatatgggttaataaaagtactgtctctggggttttcatgagaattaaagtagataatccatataaagcccttgtaatgataatgctcatatgttttcattgccatggtgatggtggtagtgataatggggatgaagatggtggtgatannnnnnnnnnnnnnnnnnnnctctgatcgatgaaaagaagttcactcagggaacactgaaggggagaggaagaagacaatcattcccagcacatacggagtccatgaccaaaggcacatgtgtagggaaactgtggtggtgtggagaagcattcatacaatagagttattcataagggcttgaaaaatccagagtcctggtcgtgtgtaagggccagcagcctgaaggagcagaaaggtccctgagttcaactctagactgtaagctcccatctagataactagctccttaggcagcagagctcgtccttacttctccttgacctgtaccatgggccagcacagtacctggcacgtaatacgtgaaaatggtgatagtggtgctgataatgaagatggagatgatgatgatggtggcagtgacagtgatgataatgaaaatggtgatgatggtaatggcaatgatggttatgtgtgcaatgaatgctaattgctaatggactgagcgtttggcccaaaagccttggttctagctctgtccaccctcccaacatgcccacgtcaccagctctgggacctgaacagctttggtttctgcatctacaaaataggaaatgccaactctgcccagcctgccttgcaaaattctaaacaagatgattatatgtatatagttactagagtaggagttattaatctagggttcatgggaaaaattcaggggaggttcgtgattttggatgagaagaaaatgatatcttttttaatggaattctaactgaaatctagctaaaggtaggtaacaaatcacagtagtattagcagtaactaactgactcggtcaccagtaggaatcatctattttcctgtcacattatagttggtgcagatacctctaaatatcatttatgctcaccactacttcaaaatttcaggagttaggccaggcgcaatggctcacacctataatcccagcactctgtgaggccaaggtgggtggatcacctgaggtcaggagttcaaggccagcctggccaacatggtgaaaccccatctctactaaaaatacaaaaaaaaaaaaaaattagctgggtgaggtggtgtgtgcctgtaatcccagctactcaggaggctgaggcaggagaatcacttgaacccaggaagcggaggttactgtgagccaagatcatgccactgcactccagcctgagctaccgagtgagaccctgtctcaaaaaaaaaaaaaaaaaaaaattacaggatttaatagacctgccatgatatcttgttatttaatgtattaataaagaaacacacgtagtaccatacattcagtgttttaaaatgtattttgtaatccaggccccatgcagtagctcacacctataatcccagcactttgagaggccaaggtgggaggattgcttgaggccaggagttttacgccagcctaagcaacatcgtgagaccctgtctctacaaaaaaatttaagcagcagccagacatggcggtgcatgcctgtaatcccagtgctttgggagcctgaagccagaagttcaagaccagtctaggcaacatagtaagatcccatctctacaaaaataattttaaaaatcagccaaacatggtgatgcatgcctgtagtcctagctactcaggagctggaggcaggagggtcacaggagcccaggagtttgaggctgcggggagctaggatcacactagtgctctccagcctaggcaacggaacacgaccctgtctcaaaaaataaaaattttaaaaatgttgtaatcctgtatataatgtgtgagtcaagaagcacaggcattactttatatcagaactttggtggatttttatttttcgctgtttcataaccctgtatattttgttgtatgcattgaagagtactattctgagacaagggtccatggtctgcattcactaaactgccaagacctctatggcataaggaggttgttgccaaagttctctagagaaggagtagctgtagcagatgatcactgtcatctgactgtgctgggtaagtcccctgggctctctaagcctcagtgccctcatatgaaagttgggggtcaaatagtacctgcgtcataggggtaaatacggtgacatgcctcacttgtggggatcaagtgataaactccacgcagagccctggagcagtacctggcacacagcaggcactcaataattgccatcatcgctatgattgtgttgttttatttggactctggctggagttctgtctttcaggacacctctgggctaagggcagctttctccctcccaggttcattcggaagcagggcctggatcggctcttcctggagtgcgacgctcacatgtggcgcctgggagatcggcggatcccagagggcattgccgtggatggcggttcggactggttcctgctgaaccggaggtttgtagaatatgtgaccttctccacagacgatctggtgaccaagatgaaacagttctactcctacaccctgcttcctgctgaggtgagtatctgggaaaattttcccaagaaagataggggcttgttctagcctttgtggcaaagcagatgctgaatttttggcaaagagattctgggtccacctacattgtcctctacacacccagacatccttgctgtcttagcaggatgcctggtctccctccagtctgcacagaggctgcgtggagtagacacacggtgctaccaccggcagtccacacagtgtctttgtgcaaaatagaaaaggcagctcttcctcaagatacttggctttcattggtcataaaaatcacatgatacacagattttgttagaacaagaaccttatggctattttccagaaaactgttatttaaaaaacccttctgacatccacaatgctgatggcacccctaaaaggtatgtagtgtgtaacctgcacaactgtatatgctgaccctttcaggacacacccacatcaactttttttttttttttttttttttttttgagacagtcttcctctgtcatccaggctggactgcagtggcacagtctctgctcactgcaacctctacctccagagttcaagcaattctgctgcctcagcctcctgagtagctgggattataggcgcccaccaccacacccagctaatttttgtatttttagtagagatggggttttgccatgttggccaggctggtcttgaactcctggcctcaagtggtcctcctgcctcagcctctcaaagtgctgggattgcaggcatgagccaccatgcccggccgccacatcaacttttgacgcatccttcacaatgaccaatcatgtaatgaccacctttttacaccaagcatgccttttctcatgttgaacattgctctattattccctgaagaaaagggtgttggtttcataagtcatactccattaatccagagtattctaaaacagtcctagccccatctagaagtggggaggggatccagttctgaaggattgtcactgacattcccttagctgcctgccggtcagagctgggttgagggattccagattcatcttcctgacctccaggttgattgcaccctcatttccaatccagcttgagaacagtgcagagctggttccgtttctattgagtctatggcatttctcatgaacggtcccttgttccttcccgggaccacataggttatgtgtgtttctgcaggccacactcccagcacatctctcacctgtgtctggggcagtgccaagctccggggagggctgactgcccccatcacccagagggatgatgagcttgtcatcactgggccaggttttactattctgcacacatgttaagtaatcagcttttaatcctatttcagcaaaaatcaatcacctcttctctcaattctgataacctcctcatccattatattgcagggaatttctgtatcattatgaaaggacacagggcaatcagtaattgggtacatcttcccactgcttgttggagaatgtatgcctccctgggcttgtaggcaattcaagcttaaaatccaggttcatgggcttgtcatttagtgtcacaggaaggtcagcagggggtggcggctggagcctcatttacccacccatccatttagaagagattgtttgggagtttggctatttttaatcaagacgcccaccacgatactggtgaccaaagctccgtgtgtgtgctttctctgcccctccctggccccagcacacacaagcacatatactccagggtctctgttcagtcccacctcctgcatctctgccttccctcccttctcccagaccacttcaagaggactggtttagaagaaatcagaaggctgtgcccattaacttgtaacgggcagacacagattccccaacagcttcccttagggagagagaacagggaggaaatatatttgcctgggactgtctattatagaaatctttctctcactctctggcagtctctcaagtactccagtgattgattgtttctcctctagtttttcttttcagatccaacatggcctctttctcagatcccttaaagcagttggccaagaatcctgggattagggagaaaatatggcacctggttcagtaccatggacagcaagcagccccacccactcccttccctatgttgccgtctggcgatgcaggaagccctgggtctaatgcaaccatcaatctggtctccctaccccaggggtgaaattccagcacaccagtcagtcagtcagacttgaatccctttgatttgtctgttggacagagcatccgcctgcgctctgagttggaccacatgggcagctgacctcaaatgcatgcagagaacataagagtcccttgacagtcaggtagttgtgttatacatttttgcattgctatgaaggaaaatctgaggcttggtaatttataaagaaaagaggtttatttggcttgcagttctgcaagctgtacaggaagccgcccagcttctgatgagatgccacattcttttaaacaaccagttcttacatgaactcagagcaagggttcaccatttcccaccccagttcatctgtgggaggctgggagaggtctcaggctgggtccctctctcccctgcagtccttcttccatacggtcctggagaacagcccccactgcgacaccatggtggacaacaacctgcgcatcaccaactggaatcgcaagctgggctgcaagtgccagtacaagcacatcgtggactggtgcggctgctcccccaatgacttcaagccgcaggacttccaccgcttccaggtgagactttctcatggtctgccagcctcctaagtgatgccttcccaacaaacctctgcagaaatccaaggccagacctgcaggtcatcttatcacatggtgcccaaacctggctgttgataataatagttaacagtatcaacaatagccagtgtttattgagcacttacttcagggatgttctaaccacattgactcattaacccaaaaacaacaaatgacctttcattattattccattttagggatatgaaaactgtgaggcacagaaaggttaaaaaaaactttccaaaggccatactcatatcatcttctctttattcccttttcatcagaatctcccaaaatatttgttacatttgtacccaggaatatgcttttaagtatatatctagggctgagcttttcaacctcagaactcttgccattgtggctggatgattctctgttgggacatgctgtcccatgcatgggtaggatgcttagcagcacctctggttgagaaaccctcatcagtgatatcgacgaatttgtatttttaatgaattgcacttttctgaggagcagccaggtttggaaaccactgtgttctgtgggaaaacactgtgttctgtgtacttgaaggagtaagaagaggtagaacattatcccctttacagctgtctctgggcagcctaacaatttacagttctggggaagggcagagcaggagggtggggaatgctcatccacttaccatgagccctgagagtgcttggccccaagatgggcaccccttcctgctctgctccctccaagccagcatggtggcttcttcctccagccctccccacacctagcagcagagagcacaaatatgagtgccactgaatggttaagcgaatcactctgaggtcactagagccaccgtgtagagacggtatgctacttcccaaaccactaacacaggaaggcagggacacaatgccaggctcataacccagccaaggtgcccttgatgtggagcgggatgctgtttgtttgtgtttgatctcctctgtgccgggctgtgtgggcattggctttactggggcagacatcacttttattgttcaggtaaggaaacgaaggcatggaggggtgttccaagtggggtttttttccagcagtccctgctgccttcctggtttttgtgcctgtatgaatgcagagtacactgcaggttttctgtcgttcgtattccccttaaggttcccacacagcagctccagccaccttaagctggcagacagggggctgcctaaactcacatcttccctgcagaaaggatatgctgagccgaaagagggttgcaggggaatgtttgtttgacctattcaatgaattcccatgtttggagaggacccgtccctcactgccctaatcgcagagaatcttcatcacttagagcacaaaacctccacgtgctgattcccagagccctgcactcccccaggcacaagcatttgtatcctagcccggcatcctggggacattgtagcctctgacaaggagtgcctcatgtgttcacagcaagcagagattaagaatatcccccaagatctagagtcaagacactgctgcctgtaaggaactcagagttcttgcgcgaagaacttggagagaaagaataatatggtaacgtgccctgtttgttagaagatccagctatggtcggaatcgcaggcagagaaaggagtttgttctgcccctagatgggttcctggtaacaaggggctggtgataataatcaaagagcagcctacactatgtgctagacactacgctagtaacccattttaaggatgctgaggcccagagagtttgagtaacttgacctgcacagctagacggtagccaaatgaggatttgaattcaggtggtctaactctctacagtgctaagctgtgctccccaccacagagaggtttcctgaagcagactggcaatgagatgtttagaataacaccaagggtacttacgatcagggggcttcccagtttactcagttgcctcagtcctggagtgatacagtagaaagggcttggattttggagtcatgcatttgggcttcaaatcttacaatggtgtgagtctgtacatatcgctttgcctctctgagctcagttttctcatctgtaaaatgggaatcataatacctgccttgccaagttacagggaaaattagaggtaatgacataagtccattgccctgcgtattgtgtgtggtcagtagttgttgctgctattaatctaccaccatgaaaacagtgctggacccaactttaggtcaataataacactagacaataataagctcctcaagggagagacctgtgttttatttgtctccgcagccctacacaaggggtcagcaaactctagccctgggggccaaagtcagcccactgcctgcttctataaatgaagtttagttggaacacagccatacctatttatttagtctcttgtctgtctgtggctgcttttatgctataaaagcgaagctgaaggtttcaaagctattttaaatatttactgtctggccttttactgaatataaagtataacacctggtagcttacaggtgcttagtatttctttaaccctggaccctgactcttcgtcccatctctgatagtgacttgctgtgtgttctcagctaagtcccttaccatctctgggcctgtttccttgagagtttggttgctatcagtggtcctgaaacactgaatcataatcacctgggaattttttttttttttttttgagctacactccagagctattgactcagtaggtcctttttctctgagacagagtcttgttctgtcacccaggctggagtgcagcggcagtctcggctcactgcaacctccacctcctaggttcaagtgattctcctgtctcagcctcctgagcagctgggactacaggtgtgtgcctggcctggaatctgaatttttcaaagtcccagagattccgatcccttgtgagtctgcaagttggctgaaataccaaagaggcaatagggcatggtggagactgcagtgagcagaagaacctaggtgctgtctaaaggaacagccactacccttcagctttaaccagttgttagcatgtggagtgtgggcctggggttgccagatctattgctgtttaaagagaagccaaaagaatttccgtgaactctttcatgttttaaatatggctagctaaaatacatctgcaggctgtatttatttgccctagattactagcctgtgacctgtacctaaatgatgtctgagatccatcccagctattaccatctaaaattatttagtttatttaacagacatctaaatgatgcttactaagaaatgatgcttactaagtgcctatcattgctttagatgttctgcacagattaactcacacccttattataacccattttacagatgttgaaactgagaacacagaggtgcaaaaagtatcggagctaattcgggtccagcagagctttgcttctaaccacaggatatgcccttaggttccccccaacccccagcactcgctgatgtggcttttctatttttaatcccatgagtacagcagacagcccggcctaccttctttgcccgcaagtttgaagccgtggtgaatcaggaaatcattgggcagctggactattacctgtacgggaactaccctgcaggtaccccgggcctgcgctcctactgggagaatgtctacgatgagcctgacggcatccacagcctgagcgacgtgacactcaccttgtaccactcctttgcccgcctgggtcttcgacgggctgagacgtccctgcacacggatggggagaacagctgccggtgagccctatatgggatgcagagaggagagctgagaagcaggaggggaggctcagggtacagagtgggggtccttcttcctctttagggatctgcaatgcaatgccaccctatgctttctctcttcctttgcccaaaactcatctaacgccaccctcctagcgtgcgtggcatttccaatccaagctgtgctttactttctcagataccagatatcctatgtacccaatgattttactgattcttcatgctacatatatatactttagaaggaagctttttgtcaccatatcatatgtagcatttgtcttaagtggaaggtacaaaactttttttgatggaaaatgtcaaagatgtacaacatagaacagtggaaccccatgttcccgtcacccagccccggcagtttccaactcggggctgatcttgtttcattttcatcttcacccaccttccgcctcctcccggatcagtttgaagtcaatcccagacatcctatcatttcagccatcaatattttaataatgtatctctgaaaaataactcttttaaaaacattcaccataatgtcatcacacctaaaaatatcacaaagaaaattaataggcagaactattgttgaaacttctcaaccaccccttacaattgtctcatctaccactaactgccaacacttcaggaaagagtgttctagaagatgagggggaggtaggaaaataattcaacataatcccttctcctctcatctctttccctaagccagtcaagactttcacattgtgtaccctttcttttgttctgaagcaatatgcattttggatatttacataattgcaacaagaattgggtatcctgttttcttcccttggcattatactattagcccccatttctccacgctgctcagtagcttccgcaatgataatgattccttttaatgcctctagtattccattgagcagaagttccagagtttgcttaatctggcccttcactgttgccattgtcagtaatgtacccttgtaaataatgttctgatgaatatcttttctcagaaagccctttttttccattctctcttttgattatttccttaggatagattcccagaagtgcctctaatcactctccttctttttcttgttcatttaacaacatagcatcttttttttttagcgtcagtctctgacggggctggggggaagaagattgttcactaactctctgaaaacacaggcaggtttcccacctggtgtctcatccctggccagcaaggtttccgcagggctgtgacactgtcccatcacctcctcacatccctcggcttctctctccgtaaagtttctgatttagtttaaagggagactagtgtgggttaggaacccaggacctgcagtttaaactctgcttacaagctattgaccttgggcaagtcattcatctctctgagcttcggtttcctcatctgtgaaatgagaagagtaatactcatcatttttgtatcataaggtgttgtgaagtgtaaaggagataatcatcaaaaactacctgatgagttagttatacagtgttcttttgagacagagtcttactctgttgcccaagctggagtgcagtgatgtgatctctgcaacctccacctcccaggttcaagcgattcttctgcctcagcctcctgagtagctgagactataggcatgtaccagcacacccagctaatttttgtatttttagtagagacaggatttcaccaggttggccaggctggtctcgaactcctgacctcaggcaatcctcccgcttcagcctccctaagtgctgagattacaggcatgagccattgcgcccagccttgttattcccattttaacagcattttatgtactaactgctcagggttcaggtcattgctggtatcttagttgccagttgccattatgatgcagccaacagtgaacctgctgtgtgtgatggtaacaattccttgttctctccctgtattttctttgctcactgcctcccactgcacagccaccccttctcaagtcaacaaagccatccaaggaccacctcctctatgacacttattaagatagctcaccccacacccaccgtctcccaagctgaaagtagttcagggacttcaccttcagtatgtgcggtatcttggctcaaggtcaccagggagtctctctcccccccactgctagtctggaagcagaatccctgcatgtatccccagtagacagtgcagtgcctgccacttggaaggcaaatgtcgttccataataattacagttgcaggcttcctagaatgtataaggtaaatgatcttacaggaaattccaaaagacacccccaatttatctagggttgttgaaggttgctcctagtactcattttggaatgaagtgagccgtcacattgcctcgagccaggaatcctctggtatccacctcgttttttattgtaatggaactgtggtgccttgctgtgggcaaagccaatgtatttatgaataggagcctgaaaataaatcaggacaaaagacccttatcccaaaaggcagaagagaatggattcctagccccggggcatgtggggaaacagcaagtgaaaactttaacagtctcgttttatctgggtattttaggcaaattgtgcctttccagtctataatataacctttcattaaataatgtttattgatttttttttctcattataaactaacacatgtgcattgcagaagtttctgaaatggcaggttgagagaatcagagtaaagtttgcatataatctaccatccagaaataaggatgtcagcattttattgcaggtccccaaatgccctccggggcaggcacgaagcactagaatcactcagtgtgccccctgcagggtgggctgaccatgggaacctggaggtccatggagctgaaccccagtacattccgtgggaatgcagatggagttgccaaccaaatctcctaattttttttagtgctcatcgtatttaaataagaaagaaaaacacctttgggccaaacgaatacttcggttgcattcctgtagatgatgattgattgtgcggcatcttgattatttttctgttttgagacattaacagttttcattacttagataccaaatacagtcaggatgaggcatcagagggctttgtgctcactccttggttacagggactgtagatgtaacttgaggttcaagagaaaatccttctagaattttcactccttcaataagtactgattgagtagttatcgtgtgtcagcctgtgtgttaggcacggagaattcagccttgatccaggcggaccaggcctgtgaactcaaagccctcccattctagtgtgcagacagacagtacctaagcacaagtaaaccagaatataagatcaataagggtaaatgctgtgcaaaaaatgaagataaagtcatgtgagagtgacaagtcagaggcagcaatgaggaaggaagtggtggattagggtagcaggaaacaaaagggggctagagaaagcggtagggctttgtggaccaggtaaggagtttggattttactgaaagcatgaagcaaagtgcttgtggcatttaagtgagggacgatggacgtggctactatgggaacaggttatagtgggcaaaagtaagagagggtgacaattaaggaagctcctgcagaggcccaggtataaaaggatggtggctttgaccaggatgctggcagtgtgtaaggagaatagaggatggaaggggccaggtgtgatggctgacacctgtaatcccagctactcgggaggctgagtcagggagaactgcttgaacccgggaggcagaggttgcagtgagccagtttcacgacactgcactctagcctgggtgacagagactccatctcaaaaaatataaagaaggtgaaggaggcaagtaatcaaagattgacttctaaattttttggactgctgctttctggaaacactctcttcctttgactcccgtaacagcaaattctcctgctttacccacctcacagaacacacactggcagtgctttgtctattgtcacgataacactgtgaaacaaacaactcccaaatcagtgttttgaaacaatatgcattcatgtaatgctcaagttcgcagatcagctggacagttttcccagtatgggcaggccttgctcccctatctgcagccaactgcaagtcgggaggtggctctgtggtccttggctgggaatagttgcctgagcctaggatggcttcagctgggacaactggcgtagctctgctgtttcaaatgtctccttctccagcaagctagcccaggcatgctctcatggtgacctcaaaagagcaagaaagcaaacagaaatgtgcaaggcatcttgaggccctggctcagaactgacgtgacagcccttctaccactttctgttgtccaaagaagattccagaggtagaaaaataggttctgcctcccgggtacaaggaaacttgcaaagtcacatggaagaaagcataagataaaggagatgggagatttgggacattaatgcaggtgaccactggctctttcatgactatctttgctgtccaatacggtagccacaagtggctacttcagtgtaaattaactaaaactaaatacaatttaaaattcagttcctcagtcacattggccatatttcaagggctgaacagtcacactttgctagtgggttgggagacagctttcccaaagtctcacaaatcatcactaaagaacttactcatgcaaccaaacaccacctgttccccaaaatcctatggaaataaaaagcttttggcctggcgcagtggctgacacctgtaatcccagcactttgggaggccgaggcgggcggatcacttgaggtcaggagtgagtttgagaccagcctggccaacatggtgaaaccccgtctctactaaaaatacaaaaattagccgggcatggtggctgatgcctgtaatcccagctactcaggaggctgagtcaggagaatcgcttgaacccaggaggcggaggttgcagtgagccaagatcatgccactgcactccagcctgggcaacagagtgagactctgcctcaaaaataaataaataaaatatttctgtcatcgcaggaggttttatgtgatagccctgcctagatgttgctgcagtggtagaatgacagcacagtcgctggactttccactcccaaagtccagatttaaaacaggtttgcatgaacggtgaatgcccaacaaaccatctgaagactgttcaagtttttttttttttttttttttttttctatgctccctggaaggcatcccagtaacaaggcaatgatttcaggagatgtgtgaacacaggaaggcagcttccctaactgttataattggacataaagacttaaaactccagatcaggaccagagggaaggctgcgtttagctgagcagggacaatgatttgtgaaatgctattatgaaggacccacaagcgccttataaagctgtgcaatttacacattgcagaagcggcagctatttatctgacaagtaggaaatataccaaactggtctcctccgaggtactccttttttgccatctgcttcccccttttctccggacatctctgcttcacttccctgcccttttcagccagcaagtttttgtggatcaaagacgtgcattttaaaacaacaaaccacttttgcatgtatgtgcatgtgtgtttatctcagattggcaatcatggttaaagatgataaccagtgtaagtggtaaggactgtgagagaataaatcagtacttctgaaacagttaagctgcagacacgaagagcctcagacatttaaacagagagagagacgaatgaaaggttttgctcaaagatgttgaatgcagcattgtttagagaagcaaaaaattagagttatcatccaatgctagagaacttgctctatcaaatctggtattaactatgatgaaacacaccgagcatcaacacatacaaaatcgtgtcttcagagacttttcaaagatgtgataatcctcaggaaatactatacaatgaagacagaataatagctaggatagatagatgccaactatgtagtatttatgcaaatagtatttatgcaaatagatgcataggaaataaggccgaagggaaatccatcaatatgagtgttcacacaccattttcactgcccggtaccaagcaccagaggactcaatatctgtgaattgacattatgtatgggaagaggcatggaaagtagtcatttcactttctttgttgtactttcctacagtcagcatgtttttcattcacaatcagcagaagaaaaaagtattcatagtcattgagatcatagatacagaggacgcaaggaaaacagtaggcattgtgcacaatggggactgctttaggaacaaaactagcttggtgggtggggagcctcactgtgatcctacaccccttgggccctaatgcatgagcgcctgtgttttcagatactacccaatgggccacccagcatctgtgcacctctacttccttgctgaccgcttccagggctttctgatcaagcatcatgctaccaatctggctgtgagcaaactagagactctggagacctgggtgatgccgaaaaaagtcttcaagatcgcaagcccacccagtgactttgggaggcttcagttttccgaggtaagaggccaggtcttgtcacatttcattgtattttgcatttccctcggccagattctactccactatctgacacttctagttggagatggaggagaaaaggacttggagatccctaaagataagctaaccctgtgcccgaagaaggttctccggccccagtcactggcaccagcatcttaaacaggggaggatcaaaccaactggaacacagttgtattttttagggtagaatttctgctcctctgaatttttccagtgatgactcctaaaccaatgtcagtaatattagtcccattttaccgaatggagaactgaggcttatagagatccaaagattttctggattgctaggaagtgggagagctcaaaattcaacctaggtctctttggccacaaatcctatgcttagttgtggttttgtctccacagtttttagcacacctggattcgctcaagggaagtaccagatcaatcactgaatatatgattagatgagtagatgaatgatggattgaaggaaggatggatggacagatgggtcacatagctagctttgtttttgatcattctgatctaaatccaaatgatacaccttcagagaaaccttccccggcacccacttaagctgctgcaatagctacattctccacccaacccttccctattttaatactttttcttagcatttactatctaaaattatcttgttgctttatctggtcactcattgattgttcacaagagagctggaactgtgtctccctcttcactgcggtatccccagcacacagagagtatgtagtctttgtagatgctgagtaagacttttgaatgaatgaatgagtgtacttgggtcgtggtgcaggaaggaaggggaagcatgatcaagcctggtgcgtgttattcacacaaaactgcagcacctggtttctgccttcctcacatccctaagtgctaaggtcgtgatttgtcacaatggttctgactgctggattagggaccaagagtctgattgtagactatggtacatcttgaggggctaagagtatgttggggagagggggagtcccaccctcttatattttccttgacagtccttctctagcttctgtggccctgcctaacgaatgtatgtatccccatgacaaacaggcaccagtgagagtttcttgttaagccactgttttcaattaagactcccagtggatttgctggatgtgagcagccaagggagcccattccataaattactggcatcagggggcaattagatactgccccagttggattctgtgctaggggcctgagcagccaattgacaacattaatgtcccattaaagagatgaatgcctggtgtctgggctctccctgtttatcagcctgctgttgggtgactgggtacttctggcagtgacaaatgatgttggccgctccatggctagtgcttttggggggtggtcttcactacacaggtctggtacccttggagtgagaaccatcaaaatcactggcaaaaataacagcatgtgatgcagagagccctaacttgtattttgaattttttctaaactcttaattttagtagcaaatgaacagaaaggcaaggaagaactacaggaccactctgtgggctatttaggatctccttggtgttagcactatcccagggccttgtatagtgcctggctcacagcaggtggctgaacagctcagatacgtttctccaatccatgggaatctcatgctgttgacttggaaataaaagatgctcattctttctgcaggtagtcaccaagtgcctacagtgtgccaggttcaggagggattgtggtgaaccaaacaaaccaggcccctgtggtcatggaattgcattccaatgagacagccagccaatgagtgagcaaatagataaacaaaaacaaacagctcagctaatgacaggtattctagagaaaacttcattcatgtgattgctggggactcaggacattgatggggacaaccttcaatagaatgattgattcatctaggaaggcttttctacggagatcactgcaaagctaaagcctgtaaaagagccagtcctcgggagatctggagcattccaagcagagagaagagcatatacaaaggcccttaggcactgggaatgagctaggagtactcgagttgcagtgagaccaatgtactgggtgcagcaagtgagaaggaaactggtaggaaagaggcctcagggagtagtcttgcaggcccgggaaagatgttcaggttgtattttaaatgcaatggaaagatagagggaaaatggcagataggaggcaagacaaacttgcagcttccactcggatggacagagcagtgtatggagccccacatcatgaacttttgctccaagaactactgcagaaacatgccaggaaagccaagagaatccatagagcctttgaaggaggtggattgcccctgcaggcactgtgggacagccaaggaattgtgaattggcttgctttaacatccccaaaagatcacactagctcaccagcaatggattcaaatcaagaagaaatctctgaattaccagaaaaacaattaagaagttcgactattaagccaattaaggaggcaccagagaaaggtgaagtccaacttaaaaaaaaagatataggatatgaatggaaaaatctccagtgaaatatagcctaaatagaacacaatcacaacttctgaaaatgaaggacacacttacaaaattgcaaaatgcactggaaagtctcagcaatcgaatcaaacgagtaaaagaaagaacttcagaacttgaagacaaggctttcaaattaactcactccaacaaacacaaaaaatttttaaaaaatgaacaaagccttcaagaagtttgggagtatgttaaacaaccaaacttaagaataattggcgttcctgaggaagaagagaaatctaaaagtttgaataatggaataattgaggaaaacttccccagccttgctagagatctagacatctaaatacaagaagttcaaagaacacctgggaaattcattgcaaaaagatcatgcctaggcacatagtcatcaagttatctaaagtcaagacaaaggaaataaccttaagaggcaaaagcatcaggtaacctataaaggaaaacccatcagattaacagcagatttctcacagcagaaacactacaagccagaagggtcctgtctttagcctccttaaacaaaacagttaccagccatgcatcgtgtatccagtgaaactaagcttcataaatgaaagatacagttttttcagaaaaatgctaagataattcaccactaccaagccagcactacaagaactgctaaaaggagctgtaaatcttgaaacaaatcctcaaaataaaccaaaatagaatctctttaaagcataaatctcacaggtcctgcaaaacaacacaatgaaacaaaccaaggtattcaggcaacaaatagtatgatgaacagaatagtacctcacatctcaatactaatgttgaatgtaaatggcctaaaagcttcacttaaaagatacagaacggataagaattcaccaaccaagtgtctgctgtcttcaagagacttgcctggcacctaaggactcacatgaacttaaggtaaaaaggtgaaaaaagatactccatgcaaatggacaccaaaagtgagcaggagtagcaattcttaccagacaaaacaaaactttaaagcaacagcaattaaaaaagacaaagagggacattatataatgataaaaggactagtccaacaggaaaacaccacaatctaaatatacatgcactaacactggggctcccaaaacaatactactagacctaagaaatgagatggacagcaacacagtaatattggcacagttcatcaagacagaaagtcaataaagaaacaatggacttatgctataccctacaacaaatggacttaacaggtacttacggaacattttacccaacgactgcagaatatacatgctgttcatcagcacatggaacattctccaagatagaccatatgataggccacaaaacaagtctcaacaattttaagaaaatcaaaattacagcacatactctctcagaccacagtggaataaaattggaaattaactccaaaaggaacccccaaattcatgcaaatacatggaaactaaataacttgctcctgaattcaacacttctgggatacagcaaagccagtgctaagtgcaaagttcatagcattaaatgcccacatcaaaaagtctgaaagagcccaaatagacaatctaaggtcataccttaatgagctagagaaacaagaacaaacccaaacccaccaaggagaggtgaaagacctctacaaggaaaactgcaaaacactgctgcaagaagtcatagatgacacaagcaaatgtcatgctcatggatgggtagaatcaatattgtgaccatgaccatactgccaaaagcaatctacaaattcaatgcaattcccatcagaataccaccatcattcttcacagaactagaaaaagcaatcctaaaattcatatggaactaaaaaagagcctgcagagccaaagcaagactaagcaaaaagaacaaatctggaggcattgcattacccaaccttaaagtatactataaggccatagtcaccagaacagcatggtactggtataaaaacaggcatatagaacagtggaacagaatagagaacccagaaataaaggcaaatacttactgatcttcaacaaggcacacaaaaacaaagtgggaaaagaacaccctattcaacaaatggtgcagaaataattggcaagccacgtgtagaagaatgaaaccgaatcctcatctctcaccttatacaataatcaactgaggatggatcaaagacttaaatctaagacatgaaaccatacaaattctagaagataaaattggaaaaacccttctagacactggcttaggcaaagacttaatgaccaagaacccaaaagcaaatgcaacaaaaacaaagataaatagataggacttaattttaaaagtttctgcaaggcaaaagaaataatcagcagagtaaacagacaacccagagagtgggagaaaatctttgcaatctgtagatccaacaaaggactaatatctagaatctacaaggaactcaaatcagcaagaaaaaacaatcccatcaaaaagtgggctaaggccatgaatagaccgttctcaaaagaagatatacaaatggccaatgaacatatgaaaaaatgctcaacatcactaacgatcaggaaaatgcaaatcaaaaccacaatgcaataccaccttactcctgcaagaatggccataaccaaaaaataacagatgttggcatggatgtggtgaaaagggaacgcttttatgctgttggtgggactgtaaactaggacaaccactatggaaaacaatgtggagattccttaaagaactacaagtagttctaccatttgatccagcaattccactgtgggctatctaccagagaaaagtaagtcattatacaaaaaagattcttgcacacgcatgtttacagcagcacaattcacaattgcaaaaaatatggaagcagcccaacaatgagtgaataaattgtgtgtgtgtgtgcgtgcacatatatatatatataccccatggaatactactcagccataaaaaggaacgaaacaatggtatttgcagcaacctggatggaattggagaccattattctaagtgaagtaattcaggaatggaaaagcaaacgttgtatgttctcactcataagtgggagctaagctatgaggaaatcaaggcttaagaatgatacagtgagtttggggactcatgggcaagggttgggggatataggggaggggatataggggataaaagactacacatggggtgcagtgtatactgttcaggtgatgggtgcaccaaaatctcagaagtcaccactaaagaacttattcatgtaagcaaacaccacctgttccccaaaaacctattgaaatatatacatatacatacacattataaactcaaaaaataaataaataaacgcaatggaaagccattggttggttggaagccagggagccgtatgttaagcttgaatttgaatatgtatttgaatttgggtaattgaccattctgcagtggatggtggtggacttccacaatgaggccccttgagaaggtcttggaggatgtgacagcagcagggccctagctcaggctgccccacacctcacccttcacgctcctcggttgaaaaacaagatccaggttgtttgtcagctgctccagaactctcctgcccaggttatcttggttttaaaactcgatttcagggaagtgtttatcctcatttctttggaggatccaagggcagtgttctggagggttcccatcttcccctaactggtgaaaaatcacctccttaaatatgaccctaaagtagttttgtggccattcatctgttttgttagtatctgttggaaactagtgcatggagggaagtccatgtgttcagcccctactcattcaatatgtgttcaagatagattgatagacaggtgatacatagattgattaacagacagacagatgggtggatacgttaataggcaaacagatggatagatgattaatggatacaatagagttgacagattaatgtgacagattggtagagatagatgataaacacacataagtagatgatcaatctgtatagatcattgatcgatcaatagacaataggtgctcaatatatctttatttttagatctctatagagatatattgagcacctactctatgttcagcactgtttcagacactagagacatattggtgagcatgccatatacagtccctgccctcttggagttgacggtctagatctggagagagagagacctgtaaattaaaagatgcagtactgtgggggtcaggagaaaagctatgatgatcaaatgcttagagatgtacctcagtggtgcctctatccaggaaagacttatgagtagaggtgatgcctgagccaaaatctagattacaagtttgaggtggcctggaggatgcggggaaaggtagaccggtccagagaacaggcggatcatggccagaagatcaagaggaaacacagagcccttcaggatgaggtgctgggagtaacccagggtggcctggagcaaggagcaagtggaagggagggagagggatagagatgacagaagtgaagccggagccagaccagaaaggtctccaggacaggtaagcaactggacttagaaaccaagagttgctgaaaggggttgtaagcaggaaaatagaaatcgggtttctttagaaaaacctctaagaccttgaagcttgaactgaatcctgttgatcattcatttattccttcaataaatagtatccttttaattcctactgtgttccgggcactatgctaggcactggtgggtcccagaaggtgctggtccctgctgatccacagggtagtagaaaaataccaagatttcataagtctgggagggatggcagcccccacaggaacatcagagcggtaactacctctgttactctcaggatgctttcttagtcctaatctttagtctctggcctgatgaaaactgaaagcaagacacatgccagtgagtgtacacagatggcagccacccctggtaggcagtagggatttggtttatgtgtgttgggtgaatgaatgactgagagagtgaatgaattcatgaatggaaggcaatatgtagcacagtggatgagaatgcagcctctggggttggacttcatgggttcccatgctggctctgcctcctccgaccatagcgagttatctcacttctctgagactcagtttccacatctgtaaagtaaagataatgacaagggtctcccctttatggatttgggagtatcaactgaatggacacgtctgcctggcacactgtaatccctcagcaaatattagcagtgaagctctgtaagctgggtaaagaatggactgacatagtacctcttgcaagaacaatgagaagctagatcagctcctatttcccctgcacataggaaatctcagaatgtaggtatgtgtatccacacccgaccttcgtgcacacacacattagagatgctaattatgggaagacagcagaggcagtgcaagcttcatactgtacccgttatttgccccaacatgcccacatgctgtgtcctcaaaaccactaagttaatccacctgggggagatctttttttcaaattagatgacccctaatttaatttgatttgaaatagcaacaaaggtccttgtcaggaatctccctagttcattcagtttttggtcaagccattcacccattcattcaacaaacattactcgagcacctgctgtgtactaagcatggtagtaggcaccaagaaagagcagggaaccagccaggtaaaacccctgttcacacagagcttatattacagctggaggagataaagaataaatacatcaacagacaactctgagatagtgcttatcaccactgataggaagaaaataaagcagtagggaatgacacagattgactgaaggtccatttgaaatttggggtggggggtggtcagataaaaactctgtgaggcagctttagacataaggggctggctgtgcaagaaaggagtattccacacagggcagatggtgcaggaaagctgagctgggaatgagcctgccttgattgaggtggctaaaacaaggcatcctggagaaagatggggagggggtcatggagatggaggatggggtgagctcagactctgagtgcactaagaagcctgggggcagcagtaagaggacattttacaaggcctttctgactacaggatatagaagaaattgcaggtggcacaagtggaaggagggaagcccaccagagaggattgctgtgggtcacagctgcacacacccccagctggctggcaggaaggaaggatcgcaggatgactctcatgcttacagtccagatctaggtgccttgggaaagccaaagctgtctcttcctaggaaacctatttgaacccctgtagatgacaggcaatgctgagggtctctagcttatgatagagcagctgtaaaaacatgatctctattcttgttcagaaccattgcaccaagtggaggtgtgtgatttagaaaaccaaggatggaattggaaacccgctgtacctgttgagtggcagggtgtatgtttctgtggaatggcctgcaagcaagacatgcattcattcattcattcattcattcattcattcgttcattcattcactcattcagctcatgtgtggttttcttttcaaagcacatgccatacaccaggcacaggaggcccggtggtttaataaaaggaccacaggccttttgatccttcagactgagtccagatgccagatcttctgcttacaagctgtgcaaccttgagcaggtgacttagttggagcctcagtttcttcatctgtaaaatgggtatatgaaagctaacaaaggggatcctagacctttctgagacctagccccctagttcaggcccagtgacttcagaattcactcccctgtttcaggtcggcactgactgggatgccaaggagaggctattccgcaactttgggggtcttctggggcccatggatgagccggtgggtatgcagaagtgggggaagggacctaatgtgaccgtgaccgtcatttgggtggatcccgtcaatgtcatcgcagccacctacgacatcctcattgagtccactgccgaattcacacactacaagccccctttgaacttgcccctgaggcctggggtctggacagtgaaaattctccaccactgggtgccagttgcagagaccaaattcctcgttgcgcctctgaccttctcgaacaggcagcccatcaaacctggtaagtactcccagtgtctatgtgggagaaatactccttccctggggaccttgagggtctttggtgttggtaggcagcactgctcagacatagggtaagcagcggcctcacagaacagcactccttgctctcaatacttttctctgtgtttccctagagaaaccatctaatgtcctacctgcacacggagatgatgtcatctgtctaggtattaggtagctatttgttagacgctcccccattcaacttccagaaggcctagatcatactgaagacaagatgggaaataaacccaggcaggtattaaggatcagcaaatcttgtttactattttaaaaaaatcaaaacaggaaattctgttcatcaaaaatatgatacactaggtggaaaagatgaaccacataatagtagaagatatttgctacatttttttaaagtactcatgttcagaatttataaagaaatgctattcatcagaagttggccaatccagcccactacctgtttttgtaaataaagttttattggaacacagtcaccatgctcattcatgtacatgttgcctgcttctgctttagagctacagtggcagaactgaatagttgtgacagagactgcatggcccacaaagccaaagatactatctggctctttacaaaaaaaaagaccaccaaccctgctataaaagagaggaaaaaaatggaggagagaacatgaatggcccctcacacacgcaaaaacatgttcagcctcattaaaaatgggagaaatgaaaattgaaagcaaagagaggttccacttcacacccatcatattgggaaatgcgtgacagataagaacctgtgttactaaggctgagagcaataggcattcatgcagtgctagtgggagggtgaagtgctaagacgagtttagaaaatgttttagtatctcctagtaaagctgaacatacacacaccctaccacagacgtctgaccccaaggtataggccctagagacatgtgcagaaatgctcacatgagaattattcttaatagcacaaaaccagaaacggtctgattgcctgacactggaaaggagaaacaattggctggctgttcatacaatggagtactatgcagccgtgaatagcagtaaagcatgggcatgtgttggcttggatgagtccctaaaacatagtgttgagggggaaatatcacagataaatcataattatgatgtatttatgtcaagttcaaaaacaggcaaagtcaacaatatcttatttcaggagtcgtatgtcaaaggcagctgttaggaaatgaaacatgaaattaacatgaaattcaggtcagggtttccatccccatggagaacagggactgggatgtcagttcctatcctgcctgacttttttctttgtccattgaaagggtttacttttatccttctatttcccccgccccttttcacctccttttattaaggggaaagtctttctccctgctcaaatcctacctctagagaaaccactgccaacagtctggtgtgaatccttttagaagtttttccatacttttaaagcataaacataatacacaccataaatcacaaaacctttgctattttttaaaaatgaaataatacattgtgtactgtaagattgctttttttttttttttttactttctaagtcagtatatataaagctaccagctacatgatattccactgggttaaggaaccacaatctatctgttcccctattggtggacacataagtttctgttgttgctgctgatgatgatgatgttactgataatactgcaaggaaaagtcttttttttttttttttttttttttttttttaatataacagaggttggctgggtgccatggtttacacgtgtaatcccagcactttgggaggccaaggcaggcggatcacttgacaccaggagttcgagaccagcctgaccagcctggccaacatggtgaaaccccatctactaaaaatacaaaaattagccgagtgtggtggccggcgtctatagtcccagctacttgggaggctgaggcacgagaatcgtttgaacctgtgaggcggaggttgcagtgaaccgaaatcatgccactgcactccagttgggtgacagagcgaggttctgtctcaaaaaaaaaaaaagaatttaggtcaggctcttttgcctaggctggagtgcagtcatgcaatcatagctcactgcagcctcgagctcctgggctcaagtaattctctcacctcagcctcctaagtagctgaaactacacgagtgtgccaccatgcccggctttttttttttttttttttttttttaactatttttgtggttgtgtggtctgtgttgtcctggctggtctcaaactcctggatctaaaccaaccctcccaccttggccacccaaagagctgggattacaggcgtgagccacccaccacacccagccccaacaaggaagagtcttaaacataaaattgtatgtgcccagccgggtgcggtggtcacacctgtaatcccagcacactgggaggccgaggcaggtggatcacgatgtcaggagatcgagaccatcctggctaacacagtgaaaccctgtctctactaaaaatacaaaaaattagctgggcatggtggtgggtgcctgtagtcccagctactcgggaggctgaggcaggagaatggcgtgaacccgggaagcggagcttgcagtgaactgagatcacgccactgcactccagcctgggtgacaaagcgagactctgtctcaaaaaacaacaacaaaaacaaaaaagaaaaaaaaaattgtatgttcccatgcagttacatccataacacaaactcgtagaaacaggatttctgggtctctctatatttggaattattcatgtccatctctaacagatcacaaactcaaaagccagaaatgcattacagcctcttagctttgaagagttctggattgggtgccttttagccaatgatgcaaggggatggggacacagcatggggaggaggtgccttgagtcctagcaaagggagttgtttgggaaaaactctcaaaccacttttcctctgctctcacactgccatgatcaacacagaagatttctgtgacagcaaaatacatggggaaattttccccgtcagcaagcaagcaatcagttctgcagcagacaccagctgggtgtcccccaattcagttccaacactctccaccccagaggtagcatcagacaccgcagagtgagggctcagtgccataagaccacccccttctgcccgctaatcacaagtctgggcctttggaacttctgaccaaatggtttcaaactggggttcccacaaccccctctttgggctcaattactctgctagagcagctcacagaactcagggaaacacttatgtctattggtttgttatgaaagatattttaaaggatgcagataaacagccaaatgaagctatacagagggcaaggtccagaggagtcctgagtgcaggagcttctgtccccatggcattggggtgcccaccctcccaacaggtggatgaatctgtccccatggcattggggtgcaccaccctcccggcaggtggatgagtctgtccccatggcatagggatgcccaccctcctagcaggtggatgaatctgtccccatggcattggggtgcaccaccctcctggcaggtggatgagtctgtccccatggcattggggtgcccaccgtcccggcaggtggatgagttcttcctcaccttcctgtgaagatgctaccatgtattcagctctccagaagctccttgaaccctgtcctttgggccttttatgaagacttcattggttacccatgactgaagcatgacaactgtgtcaaaatgtgattggacaaaaagggtctgacctaactcagcaagccctgtctgttcagattctccttggcctctctgtgcagtaattccttcctccagggagtgtgtcagggccctctctggaatgagagtcctatcacccacaatctgattagactctggcattaggcagcagaagggggacaggaggaggccagagcgagagagagattctatttgctgagtcctaaagtgcccaacattgtaagaaaagactgtaagaagggttacaggagttctgagccaagaaccgtggacaaaaaccactatcatggcctggtgcagtggctcacgcctgaaatcccagcactttgggaggctgaggtggacggattactcaaggtcaggagttcaagaccagcctggccaatgtggtgaaaccctgtctctcctaaaagtacaaaaaattagccaggcatggtgacgggtgcctgaaatcccagctactcaggaggctgaggcatgagaatcgcttgaacctgggaggtggaggttgcagtgagccaagatcacgccactgcactccagcctgggtgacagagcgagactctatcatctccaaaacaataaataaataggccagacacggtggctcacgcctgtaatcccagcactttgggaggctgaggtgggcggatcacctgagctcgggagttcaagaccagcctgaccaacgtggagaaaccccgtctctactaaaaatacaaaattagccgggtgtggtgacgtgtgcctgtgatcccagctactcgggaggctgaggcaggagaattgcttgaacccaggaggtggaggttgcagtgagctgagatcatgccattgcactccagcctggcaacaagagcgagactccgtctcaaaaaaagaatcaatcaatcctctatcataggagtctcgaagtaaacgctcagcttctgctgtctttgtgcagagcaagcagaaagacagagacctcatgttttcttgagctggaagcctgctccttcttccccatgaaccaggcaaaagacagcccctccagagctgaccaggcccaatcccacccccttagaggtcttaggttccttcttgatctagttcacatctttaccatctctaacgatgtctaatgccagacatggaggagaggggagtaaatggctgtgtcttcgctgcttcaggtacacctgttggacagaatgaagcagtgctcctgaacacacccccacgccagtggagtagcctgggggccattcatggggtcctgatttttccagtgttttcttctagagtttctaaggaaggcagggctctccctacacatgcccaggatgacccaggaatcattttacccccaccgagagcagccctcctgtccttggtaattgtatttgttagcgatgttccaatgaatgacagtgaacacaaaggtgggagcaatgcaatttgtaaaatgattcatcaagagtaattttctattgatgcgtccctggtaatcgcaagaaatccgatgaggtggaattgaggaaaatttaattatagagacgagcatcgcaagctaatattgtaatagcgtttcccacattaacctcatttctcataagggtttttttgcatcaaccacaatatttggctcccagcgttcgcaggtttgttagctgctcttttccctttgaatgtcctgccttttgtcagtttcggtatctcctcattctccactttctcactctgcagaatagaggcactaaggggctctgatagagaaattagggcccgcaccaaagacagcaggctctgttctcctggcaggtggggctgaagctgcccaccctaccctgtattagagaaagatgggttaggaccagacttccaaacactgtggctcctaactaccgtgggagaaagcagctttgctaaaccccttgcgagacagagtatgtgctcaatgactgctcacctccttcctcccacttgtgcccatccaaaccacagaacccaacccttttgcttcctggggcattgggaattgaaggagtggcgatcttgtctgtgttagtcaaggcaaattttgaattcatctactattctcactgcttttagaagggttagcatatggtctttcttccttcttcttgcctgctctggacacttgttaatatccaggctgtcctgggtgcctttggtggtggcagctgctgtcaggcaaacaggaagcactgtcttctgaacactgcattatcttggaaggtttcttgtaatcctagctatctcagctctcgcaaagcctgatttggtaaagcgcaactcaccagactcattggccagcctttttaaaaatatatatgtgcttctactgagcaataaaacaagcaatgaatgtgaacgtcttcaaaatattagaaatagcatctattagaaataatagaagtgtttagcttctttccttcaccccaaattgctatacttcctgattcctcatcgtgcagccctgggaggtagtagtagtagtcactcttacgtacatgttactgtttaacccatttatgcctgaggttgcaatttttaaaatttttttttgagatgaagtctcactctatcgaccaggctggagtgcaatggtgtgatctcggctcaatgaaacctccgcctcccaggttcaaacgattctcctgcctcaccctcccgagtacctgggattacaggcatcagccatcacgcccggcttatttttgtatttttagtagagacggggtttcaccatgttggccaggctggtctcgaactcctgacctcaggtgatccacctgcctcagcctcacaaagcgctaggattacaggtgtaagccatcgtgcctggcccaattgtttgaatttttgcatgagtgaaaaatcagaccttggtgatggccttgagcagtagagtatcagggtgagtgataagcactgcctttggagtcagtcggtcctggatttaaccccagatctgtctctaactccagctgcctctctttccccatctgtaaagtaggaatgataaaaccagccccctagttttttaggtgtgtgaggattatggactaataccaacagtaataatcctagctgtatttgtctgttctcatgctgctaataatgacctgaggctgggtaatttataaaagtaagaagtttaatggactcacagtttcaatggtcagggaggcctcaccatcatgatggaaggcaaaggagaagcaaaggcacatcttacacggtggcaggccagagcgcctgtgcaaggacactcccctttaaaaaaccatcagatctcatgagacttacttattcactatcacaagaacaacatggcaaaaactcatcatgattcaattacttcccaccaggtccctcccacaacacgtggggattctgggagctacaattcaaggtgagatttgggtggggacacggccaaaccatatcactagctaagcttttcccagcacttagtatatgccaggtgtcatttgtaaatactttatatgagtcagcacacttaagcctcacaaagtgagaaggaaggcattagtactttacccattttattgatgaagaaactgaggtacaaggcatggaggtcagaagtcacacacctggtatgttggacgtggggctgcaaaaccagacagcatgactgcagtacctgggctcttgtatgaagtgcttcacaaagtgactggcacataggaggggcccagcaaggcagcactgttatgagagctagtttgacctcccaccccacctcacccgggtccaagcttcatgctttcagagtgattgttctgtggtcagttcatgcacccttaggcttctaggaagcagaaatccaacttacgcagagtacaaggtggacgctcggcagctgagatctggacttcccaaacagacctgggtacaggtcactgtcactctccaacccaggagtcagcaaaatttttctgtaaagggctagatatattttcagcttgttgggtaaaatacagtctgtctcaaatactcagctctggtagcacaaaagcagccacagacaatatgcaaataaatgggcacagccatgttccaataaaactttatttacaaacacaagtggtgggccacatttggcccaaggactgcagtttgccaaccctcttgtctcaataccctgtttttttgccttcatgacacttatcactgcctgaaataaccttatttatctacttatttctttgttgttgttctccctccactggatcttaaccttcctatctggtttgctccaccacctagaatagatcctggtacctaataggtacttaatatgtctttatcaaatgagacagtgccttgcagatcatgggtgtttagtaaatatgtgttgactgaatgcctggcacaatgtaggtgcttaaaaatatatattggctgaatcagtgtctgcactatcaaagatgcgctataaacatgtgttgaatgaataaaggcatgcaccgtgccctgtacaaagtgggctctgtccttacgggctcagttttctcagctgtgaaatgggactgctaaaagaacttcctcatgagattgtcatgtgaattaaatgaggcgatgcatggcacccagtgcagcaccaggcacagggtaagtatgaataggcatcctattggtggctcttctgatcctgaaattgttccctttggctttcagaggaggcactgaagctgcacaatgggcccctccgcaatgcctacatggagcagagcttccagagcctaaaccccgtcctcagcctgcccatcaaccccgcccaggtggaacaggcacggaggaacgcagcctccacgggcacagcgctggagggatggctggactcgttggtgggcgggatgtggactgccatggacatctgtgccacgggccccacagcctgcccggtcatgcagacctgcagccagacggcctggagctccttcagccctgaccccaagtcggagctgggggcagtcaaacctgatggccggctcaggtagcactgggcacgaggagtgggccacagcaggatctcaacgggaaagcagccagaggggttgtggggcctgaaccccggcctcccaccctgggggaggccctctgtgaatgggtctctcctggccatagaatgatggaaagggaaggtcagcaggtcaaagcaggatcagccaacaacctgcctttggcaagctgcgggtgggatggctcagtccctgcactgtgactgtctcacctcttctggttgatcctcaagtcctacaggttccttgtcttccccttccagtgacccacccctgaccccagacgtgtgattttcagacttttctttcgagcagcagaacttcgtttacggagcacagtcataagtggaggttcagggtgctgacgaaatccaagctgctctggttgaagctgacaagtgcgaggttccctcccaaagctcagccctctgggcggtccccttgcccagggtatctcctacggtacctcttcagaacccaagggctctgcaaatgccagtttgacaagcactgcccagaccaaccatgggttcaaactccagccctgccctttggttcatttttctgcttctcttggctgggggactctggtgccagccttgaaagtcatggtcgtgggccctttcccatggaggctgcagccttaggagagctctgagcctctcagcagccctccttgggttgaactattctccttagtaactaggtaagtgggaaagccttttgatgtggcatggccaaggtccagccacaagtgcaactgccacctgtccaggggtctgggcctccttccctcaaggctgccacacaaagtagcagaaataggatgatgtttgtgagcaccagactcaagaccatgaccttctttgatccttgaaaatgggaactttgacagccatgaccatgaaactcacaaggcaacgcgatgaaactcacaaagcaatgcttggagcaaaactcctgagctagacagcacagcagcacccatcccctgccagagcccttccgttctgaggtcagacacacaaaaccttcgtcaattgcacaccggtgctgttgggagtgaccaaaccacatgaaccagacttttcccgtccaggaaatagcatttcagatttggtttttaatttcatgcccttcggccacaggctcaacgggacatgcaacataaaaatgggaaggttatttaaacaacaaaaaacagtatgatttaagtgttgagttaccagaaacccaaaaggtttccttgccacgagccccctggagtgtcatccctgttcaccaggagagctcttcgcaggaggcctcccttgctcctgtaatcccacctcccctgaatgatgggattcccttggaaaaaggtctcacccctggtagccatctgcccttcccatggagagccagtcctgacacttctctccagcgtgggtttgaaggggctgcccttcgctttgtgtgacttgtcctaatcctagccagatgtgttgccccatcccaagcctcgcaaggcagggtgtcctgttggcaatggaggacgtagagaagggacactttagatatttattatttacatgttttagtcgatgactaattagtaggtgctgtttttgcagcttgtcaattatgttaccttactaactgaagctgcctttattcacaaaaggccccttttcccatcttttcccaccccctggtgtctctctctctctcggtttctctttctctgcgtctaccccccatcctcctcatcctcagagtaaagcaggggcatcgaacaccacgcaaagaaagctccaacccgcatcttccactggctttgagtggggtgccttggggaccgttggagccttgttttttcccttatgcagagtgtcagcctcactctccctcggattccaagagtattggaattcctgagcctcccatcctccccctactcaccccccgtcacaggcacaaggaggtgacaggcagaaaacgtggagggtgagtggggaatgtgctagctgcagagagtttgtggggaatgtgctagctgcagagagtttgggccattcctgcttgctccgtggttgccttcccatggcccatctaattatgggcattcatgcgaccttaacagagggaaacaggctcctttgagagagatccatcttaggaggagggtcgtcagatccaggcagcagagtccgggagatagccattctcaacagcgattccagggatctcagggtacttttctcagaaagcccctatgatctcttttacagactctatggtggccacgcgctgggtgccacatcctctttctgcccccggcctctgcctctggccagggtttccctggggctgccgaagccactttgggagcttccctttcaccctccttgctgggccaccagtgctttgtgttcgcagcgttatttgcagtggctttggggactcagcagtggcaagtccctgtgcataatgtgaacctgcagacttcaagatggggcccctcctgcacccactaacatgtctgcctttttttgtttttatcctggaacaagtggagaaatggcagagctggctgactctggggacccttccctttttcccatggcttcatttcttcctcaccacaactaattcggggagctgagaagtcacacagggtattcctctcccttctctgatgttattaattaatagaccagagaataaggttgcagatattacatttgttgtgtttttgtgttttgtttttttttttaaggaaaatcccaaacaaagcccagcatgatttgagaaaagaggatgttttcccagggaaaataatttttttaacctgcctgagaatgatttatttatttgttggaggccattggtcagacagcctggagcttgggctgtggaagatttcaaaagcatagggctgtggtctctggaaacctattacagcctgcagctgtgagctgagccagtgacgaggtccctggaaactcaggaaggctgacaggtgggccttggggtattggtttgtggagaaggaagcattctttaggctgcggcactccttatagtttcccacccaccgagtgacattcaggcagaaattgagctcaggagacagccagccttcccacatcccacttcacttcccggtccacacgtaaagcagtgtgtctccaaggaggcagtgagcaattcccaaggtccccgtgttgtgagaagcgcgctgctttctccctttgcaggggaaaaaaaaggctttcctggtgagatcatgagtccttccggcttcatttctcattgtgggtttaacttctaaaacgcaaatggagtttagagaggatgagcagaaccacaggacctgcccccatctctcactcactgcaattgcttctactctgggcacaagtagggtgtctgaagaccatgtttccctctggttctctagtttgcagataacacagaagacactggctagaaccttaagctttctgccaaaaagatgcagagagcagggcagtagctactggcagtggggtgtgaataaagagtcctttcacaaccaagttcactgaggatttggagcaccagcttcccagcagtatcgaggggtggagaggtgtacattcaggtggaggggtacatctaggggtggagaggtgtacattctagaaacagctgttaacacactccactttaaagacagcaagctagacctgcaggatcaaagccacacactgtggtaggggttacaaatgtttatggggcccagaatactagcatagatgcgtgaaatggttggtgtgaggcaaaagggcatggtgggggcaaggatggggactgtggtcttactggcatgcacgtgacctacccagaatgagcagctgctactcagccccaacctgtcattgtttgtaaaaatgtaagcacagtgtagtggaatcttccaatttggaagggaagccggaaatccagatttaatggaaaaaatctgatttttcaacgtcgggttttttgtttgtttgtttttgttttttttaacagatagtgggcaaagaaaaattccactgttccacgtgtacactgccagcaacctctgctctctggagaggtggtttaaagtgagattatgcattgccctggtagaagaggaaaaaagccagcatcaggtcagggcaaaaataacagcccatgttgaactcggaatggggacctcttgctaagtcattccactcctcaagagaccattccacagaggggggatggatcattcagctctcctggtcccaagattgtgctgaagggaagaaggaatagaatctggagatctggactgctgccccttagatatgcagaggtccacatctgcctggggctacagcttgtgggactccatcaaaccaggccgaaatggcaaagacagtctaggaggaggaggaggtagggtgtgaaacagccaggctctctccaaatcccaagtgttgacacagccatcttgtcccatccctggaagcctctttggaaaccacatagagctgtgctggctcacgggatgtcctgtttgcttctgcctcagttaccttactttgcccatgggtctaccacaggcgctacctcattgtgtctgctgagaagtttacctgggaggggggaacaaagttgtccaaatctgcttgagctgaatgtatgatctatgcaaattctctctctcctctctctcttcctctctggctctcttagaagtttttttgttttgttttgttttgttttgtgtttaccttgcaaacaagatactgtataggaccctcttaagatggaggagggctttcttgcgccacctgtgtctacccctcacgttgtctttggctctggtcttaccaggcgtatgcagggagaaagtgacctctcttccctctccacttggctgggaatattccaactgcctctgcctacagataccaccagaaagcgggttctgcaccttgtcatccccctccctaacgtcatctactccatccctcatgttcctccaacttgcttctcccatccctccttcaaaaacaaaacaaaacaaaacaaaagccttaggtttctcctttttgaaatgtggccttaacattatttttgggaagctgaccatccatcctttccctcccatctccaccaacatcagagaagacagcatcgtgaagcttctgtggcagcctcctaaggaaggggctgccaatctgtagttggcagatgctataggaattgcttacaaatgtcgtctttaagaaaaatgttcttatatttttcctatgggcaaaatgaaggcttgggtgctcatctaaagctcagccaactcctgaagcactctctcagagcatactgctgctgtaatgggctggcttaattatcggcagagtgcttgaaaaggctttgcagacctcccctgcccccaagactgggtgactttatatgtacttcattcaagggtaaatcaggagacgttctccatttatctcttcgtccttcctgcctggaaagtgatagcactaaatattcccagcagatgggtagtgttctcaaaggaatcaccctttccctaccttcagactctattctttacccttccattgctccagtgctgatggaggccaaagacaaccccagggttttcataggaaattcactggaattgtgcgcaattgtctttgtagtccttttgccttttttttttttaaatattatgttgtcaatagcatttgtttgggtatttgttttagaggcctcactctaagttattaccgtccccttcattgttttcaaagacatgtggtgatatagtttttaaaaataactattttgttatagatcataatatgcataaaactgtacagaaatattttgtaatgtgttgattttaaaaaaagaatctgtaaataaagttttaaaaaaagaattcaaatggcacacgctgaaatatgtagatattttgctatttatttaaaggagtattttaagagatattgaactatctgaaattgaccagtaatcaaagttccaatcatctgaatgcttttccttgaggtagaatgtgagtctcagaaatgactgcattacgtgcccttttttgcaccttttctgtctttttattttgcagaacaacaacaacaacaaaattgtgccttagctgtatttttttgtctaggggagtttgtttctgtctgacaaagcaacattttttgcagaaaacagtggatgtattaaatactgtatcataccaaaaacactgcaggtgtatatagatgctttctgtcatactgtgttttcagatgcagaattttaaaattaaaaaaacactgcctttatggaacagtgactatatgtggcttcttttcagcaacattgtgcatctttacacaatctcatattctcttctgtcatctgcatggtgaagataggatgactatataatttatcatccaaactgggatacttttgagagttaaaggaagcaccacgtggatgggatgctgagactgcaggcataaatggcctatcctgggaaaacctgggtgtgtggacacatttccctcataaaaactgctgtcatcttctaactggattatagcaacaacctcctataagtacctcctggttgaggcagaagtatatgatttttaaacccgtactgagtagagaataacaagaagggactgccatggaaagttgcagtttcctatacccaactggttggttggttggcaaacgtgttttcctttcctctttaccacagagactacatttcccagactgccttgctcttagctgtgaccatgtgaccaggccaatggaacagctagactgcatcttccagactgccttgctcttagccatggccatgtgactgactcaggccaatggaatgtaggtagaataggtacatggcacctctagccctggtccctaaaacctcccactggagtctctcctctctcaatctttccctatttgccagctcagatgttttgaatcaccttgattttgtacattcatccacttggcctattcaggtggtctttttggaaactttgcacagcctctaccttaaaggaaggcagagccacagtttggaaggtaactgagcccctgcatagccacataaaagaatgcttgaccagagtcacccctattgactatgacatgaaaagaaataaatatgtattttgttatgcccctgagactttcaattacagcaggctagccttaccttaattaatccaatcagaaatggaaattcaaatgtttctttgggaaaatccacattttggttccttcactcagtcggtaaagtagagagccagacaggtgaagggatttgcctgaagctacccatggtcatcagggtcaagtctagaaccaaagtttcccatcttccaatgagactttcataagtcactgggaagaccagttcctccacccctgaggttagctcactattatgtatatatgtggtttctgagggctatgcccaggggttgggagcctagatgcctgggttgtaaagatgcttctaattcacccttcaaaatccttaaaggaagacaggcactgagacacagataggattttagcagctagaacaaaataggctagatatctccccattagacacacagaggggcaaatatatggagagctgtgtcagcttcagcctccttgagcttggctcaggagagatggtgactgactccatatttagacagatggatggacccaagattcatttgtcaaaacctctttccagcctgatcttacagccaacttccctttcctctgcccggagataattcctcaaaaaatgagttcagttgcaagggaagaataaatttctaaaatctgcgtaggagtaaggatcacagttatcttattcactgtggtacctccagtatttagcacagtgagtccagcgtatgggcactcagtgaatattcagtgaacggacaagtgaatgagaccatatatcttaattaattaacaatatgggcatggggccatttgtccaagattctgtctttaaaaccatcatttgatggatagtatttgtcaaaatatgggtcattgtaaagtaagctgtgattttttaccttcaataatgaggtttctgggcctactgaagggtcagttggaatttctttcctgcttatttactgggtttaagttcattaaattcgtgattttaagagttttttttttcttctttaaggggaatgctttttcaagcagtgtaccttaaacctccacatatatatatattttaaaaaaaaaaaagacttaaaaatgggtgattaggaggggtgccctgggtgaagtgagagtagaaagctttgtctcagcaagtgcacccacccccaccagcccgcctctttcatggctccatgggatacgtagatgaccatgctttgaagtcacaccacaccgatgttgaaaacatctaggctttttgtacggttggctttgaggccttgctgccaaggtgctgaaagttgagttctaggctgggtctctgagcatgagaccaaaccaagaataattcagtccacctggtgttggcaagttgtaagggtggaaacttagagctggggcaaaaaggaggtatggctggcctgacatgttttggagactcttgatcctgtgcattcatagttagttcatttgttccactgctctgcctggaaacatcatcagccctaaccctgacagggagtactggcctgagaaccaagaggcccaggcccttcacagctttggttgtgccactgatttgctgtgtgatcatggcgagtctctcttccatgatgagtctcagccccctcaactgccaaataaatgggagaatggggcctattgatacctggggtccattcaagttcagacgtgtaagtgtacagtccaattgccacccagcaccaaatacagaacatgttaaggtgccagctccatgcaagaaaatgttcccaagatgtgattgttgatgttcacatctatgttagtcaaggttctttcactttcaagtaacagtaacccaattcacagacgtgtaatcagaaggggaatgtattaagttatgaaacgttagaagacaacaattaaaacgcaaattacaagaactaggacagcactcaggggactcaagaactgaaactggagccccaatactcacagccctctcttcctccatttttgctggcctttgtttgatattatctcctacagacagctaattccacatggtaaataaagaaggccccagaagttcttgctgcttgtcctttgaactccataacacaaaaatatcaacgtcctttgtcctcactgccaaaagggctggctctaactctggacctatcactcagatcaggcaaacaaggcactacgattggctgaacctggatggtatgctgacccctgcgaccagggcattggacggtaaactgtgattggcagccccatccccattacatgataggagtagaagagaaatggatccccggcgggagaggatggtgtcgaacagacaaaaacaacagatgtccattcactgccacagccaactgcaggcccaggtggcttctccgcttgccagtccaattcgtttctgctcctcaagtgcccaaattttctcctcccagttcctctatacctccctaaggagaaggactctgggcctatcttaagcaaatcattttaaataaatatcacatggatggtgcagatgatttcaccctcacttaattagctgtggagtgtttatgcttatggaacatgatggattgctccttgtagcctgggcacaggacactttaaaaaggcccttgtaacagccctttgctaatgatggtggatgattttaacttgctgcaggaagcaaggcctgcgtacctgccatgaagagcggcatctctctccacgtttctggagcatcagtattccaggctcc

SEQ ID NO: 381 - DNA, 2478 bp, Homo sapiens
gatggctacttttctcatcggccgaaagagaaagtgcgaacagacagcaacaacgagaactctgtccccaaagactttgagaatgtcgacaacagcaacttcgcacccaggactcaaaagcagaagcaccagcctgagttggcgaagaagccaccgagtagacagaaggagcttttgaaaaggaagctggaacagcaggagaaaggaaaaggacatacattccctgggaaaggccccggtgaggtgctgcctcccggggacagagccgcagccaacagcagccacgggaaggatgtgtccagaccgcctcatgccaggaaaactgggggcagctcccccgagaccaagtatgaccagccccctaagtgtgacatctcaggcaaggaggccatctctgccctgtcccgtgctaagtccaagcactgccgccaggagattggggagacttactgccgccacaagttagggctgctgatgcctgagaaggtgactcggttctgccccctcgagggtaaagccaacaagaacgtgcagtgggacgaggactccgtggagtacatgccagccaacccggtcagaatcgcctttgtcctggtggtccacggccgtgcctctcggcagttgcagcgcatgttcaaggccatctaccacaaagaccacttctactacatccacgtggacaagcgctctaattacctgcatcggcaagtgctccaggtctccaggcagtacagcaatgtccgcgtcaccccctggagaatggccaccatctggggaggagccagcctcctgtccacctacctgcagagcatgcgggacctcctggagatgaccgactggccctgggacttcttcatcaacctgagtgcggccgactaccccatcaggacaaatgaccagttggtggcgtttctctcccgataccgagatatgaatttcttgaagtcacacggccgggacaatgcaaggttcattcggaagcagggcctggatcggctcttcctggagtgcgacgctcacatgtggcgcctgggagatcggcggatcccagagggcattgccgtggatggcggttcggactggttcctgctgaaccggaggtttgtagaatatgtgaccttctccacagacgatctggtgaccaagatgaaacagttctactcctacaccctgcttcctgctgagtccttcttccatacggtcctggagaacagcccccactgcgacaccatggtggacaacaacctgcgcatcaccaactggaatcgcaagctgggctgcaagtgccagtacaagcacatcgtggactggtgcggctgctcccccaatgacttcaagccgcaggacttccaccgcttccagcagacagcccggcctaccttctttgcccgcaagtttgaagccgtggtgaatcaggaaatcattgggcagctggactattacctgtacgggaactaccctgcaggtaccccgggcctgcgctcctactgggagaatgtctacgatgagcctgacggcatccacagcctgagcgacgtgacactcaccttgtaccactcctttgcccgcctgggtcttcgacgggctgagacgtccctgcacacggatggggagaacagctgccgatactacccaatgggccacccagcatctgtgcacctctacttccttgctgaccgcttccagggctttctgatcaagcatcatgctaccaatctggctgtgagcaaactagagactctggagacctgggtgatgccgaaaaaagtcttcaagatcgcaagcccacccagtgactttgggaggcttcagttttccgaggtcggcactgactgggatgccaaggagaggctattccgcaactttgggggtcttctggggcccatggatgagccggtgggtatgcagaagtgggggaagggacctaatgtgaccgtgaccgtcatttgggtggatcccgtcaatgtcatcgcagccacctacgacatcctcattgagtccactgccgaattcacacactacaagccccctttgaacttgcccctgaggcctggggtctggacagtgaaaattctccaccactgggtgccagttgcagagaccaaattcctcgttgcgcctctgaccttctcgaacaggcagcccatcaaacctgaggaggcactgaagctgcacaatgggcccctccgcaatgcctacatggagcagagcttccagagcctaaaccccgtcctcagcctgcccatcaaccccgcccaggtggaacaggcacggaggaacgcagcctccacgggcacagcgctggagggatggctggactcgttggtgggcgggatgtggactgccatggacatctgtgccacgggccccacagcctgcccggtcatgcagacctgcagccagacggcctggagctccttcagccctgaccccaagtcggagctgggggcagtcaaacctgatggccggctcaggtag

SEQ ID NO: 382 - protein, 665 aa, Homo sapiens
MPEKVTRFCPLEGKANKNVQWDEDSVEYMPANPVRIAFVLVVHGRASRQLQRMFKAIYHKDHFYYIHVDKRSNYLHRQVLQVSRQYSNVRVTPWRMATIWGGASLLSTYLQSMRDLLEMTDWPWDFFINLSAADYPIRTNDQLVAFLSRYRDMNFLKSHGRDNARFIRKQGLDRLFLECDAHMWRLGDRRIPEGIAVDGGSDWFLLNRRFVEYVTFSTDDLVTKMKQFYSYTLLPAESFFHTVLENSPHCDTMVDNNLRITNWNRKLGCKCQYKHIVDWCGCSPNDFKPQDFHRFQQTARPTFFARKFEAVVNQEIIGQLDYYLYGNYPAGTPGLRSYWENVYDEPDGIHSLSDVTLTLYHSFARLGLRRAETSLHTDGENSCRYYPMGHPASVHLYFLADRFQGFLIKHHATNLAVSKLETLETWVMPKKVFKIDPSDFGRLQFSEVGTDWDAKERLFRNFGGLLGPMDEPVGMQKWGKGPNVTVTVIWVDPVNVIAATYDILIESTAEFTHYKPPLNLPLRPGVWTVKILHHWVPVAETKFLVAPLTFSNRQPIKPEEALKLHNGPLRNAYMEQSFQSLNPVLSLPINPAQVEQARRNAASTGTALEGWLDSLVGGMWTAMDICATGPTACPVMQTCSQTAWSSFSPDPKSELGAVKPDGRLR

SEQ ID NO: 383 - DNA, 43179 bp, Mus musculus
  misc_feature (1)...(43179): n = A,T,C or G
gatcactttacagatggttgtgagccaccatgtggttgctgggaatttaactcaggacctctggaagaaccggcagtgttcctaacctctgagccatctctccagcccaattttcacatttttttcaagactgttttatgtgtatgatttttttgcctgaatgtatgtatgtgtactctgtgtacgcctagtgtccatggaccacccccccccccccggaactggagcaaatgtctatgagcccccctgcaggtgctaggaagggaacccagttcctctggaagagcagccagtgctcctgaccactgagccatctctccagcccagtttccacatcgtttaaaaaggcagaagttacatttctaaggcccatgcctttattaaaggctatgtaaaattaaagataattagacaatttttcactatcatgtctacaaggaaactctcactgtattgacctctgtatgaagtctatagcaaataaaagtgtccggcttcaaggacatattcttttgtgcccatatttaaactgaaccaaactaaccagatcattgtaaaaaaaatatttttttaaaggagagtatagaaatctagtatagccccccaaaattgtcatctttaatctcattactcagaggcaactgttaagtgtttggctattttgtgttaagtttctcttcctcttcaccttttatggtttgtgagattaatagggttgtttcactttatgaagtggttggtacatctaacttcataatccatgcatctaactctgcatgcctagagaacagagggcaacatgcttgcactggtggcttctcggatgttcttggaattgaagccaagcgtgaggcggtgtttggagaaagagagcgaagggattgacatctgggcatggtgccttgctcctgtaatcccaggatttaggaggttgaggctggaggattgctgcaagaccgtggccagcctgggccacatagccagagcctggatccaaagatatcaatagcaaaacccttccatttagaaagacatggcaataaactactttatagaatgtgaatgtaacatcgactttactaacgtgtttggactgcacactctaatagtatttggtgtgcttctaggactgcataattcattccgccttccccttctcgcacattcgattgctgcttgctctctcctgctcaagtctcctgtttaacctttcccttcacgttactttattcctcgatttcatgtctagccataccattagcccagtagaatcactttgacaggcctgtggtctgtaccaatctgcatgagtgagctaaatcccagtcctttctacctctgtttgctagagtacctcaccacaattaattttatatttcctaagggagtaatgcttttgttataacttagtgttcaaagaattgaatgtattcattctccaaccgtgagtcagctgctaaacagtgctccagcgcaggcttttgtgagcttttgggatttgatggacacagtttgtattgacaagcctgccaccctagagcagtaactggggagagaaaagaagactcttgagtgggcggtgcccacactgctgattgctagcagggtgtagcaagtacctcggctcaggcaaagtcaaatctcacgactacacacgtgtaactctttcatgtaaagagggctctacctgctgtaatttgctgcttttgtaaccctgtgtgtgtgtgtgtgtgtgtgtgtgtgtgtgtgtgtgtgatgtaaggtttttgtgagagatgcctgtgagtggcagagtctgctgcaggggtgttcttagcacttcacacacaagtgggaaagttaccacatcaccacatcaacttttagggaagtaatagtgggatctcaagtgctgccaggactcagtttatgtttaaacagcctgagtctggggaaggtgtgtcttgttaagacacttgaaaccctaaggaattaaatgctgggtttcatttgcctctttcctttgtaattgatgagaggcatcagtagtctttctccttgtcctcaaatacagccagctcatcttccgtaaggctagctgcctcgtacagtggggagtaatggttgctgagaactgtacagtgaggatctgtaccaaggaaaatctcagagtactctgagatgggttttaaatgtttaatccttaagagtaagttctagatttgagagattctggccccaagtcccttatttgatattacttgacatattatggttagtttgaaaatgggagaagtagaagtttgggcttctctttaccctgtgacttaactgtctcttccccgagttctgatacaagagtcttaggcgaacttaacttttcaaacgccgagggagggaggaagcaaagtcccatcgctgttaatttgtaaacagatggaggaaataacatgcaaatgtgggccatgcggcagacccaagggcagacccgagggttttacgtgcctgtcactcagcctgtcagctctttctgtttctgctttgtcaagagaattgaagtttgaagcacagcttcatggtggcatttatagggaaaaaaactttggtgtcataatctagatggaatttcaacatatagaatatatggaatatagagatgaaatttcaagatataatgaaaggtcttcgttataactggcaaaaggtcttttgaattacctgattttttttttttttcctgtactgctaagacaactggttaggtcctgctcctgagcaaatctacattcacgtttagtgtactgcaacatgatttacaaagagggtatgtcaaacgagagcccatgtttgtgggaggctaacaagtgaatcatttccccatagttctccccccactccccccctcgaacctgttcctaaatactgaattaagcacagactgggtactctgacttcagtgtgctcaatgctgacttatgtgaggaataaaacaactctgaatgggattccattccccagggcactttgcagttctttctggctaagggtacaaactggtggtttggcttgtttgttttgttttgtttcatttccttgagacaaggtctcacttataagctggctattttataatgttgggagcacatccatgtatggggtctagctaagcagggatttgcacaccagagccttctggatatatatatatatatatatatatataaattccacaagatataaatggatttttttcattttaaattgttgaaattagcctactgataacaatagatcatgtgaaaatgatatgagattctaattttgatgccaccatcaaattatatcacatttactcacgtgttgcgtacagatacttgcagctacagagacaaaattgtacaactgtacatattatgacagagatcatatagtctgcaaagctaaaaaaaaattgactgcttagatttttacagggaatattgccagcatcttaaacaaactacagtttctttctcacttatctttattcctttccagcagctgtcttcttggcccaggttgtcactgtatgtcaccagggtttcctgcaaaaccccccacagctaatatttagacttctctgtgagcgtgaatgcttcctggccctcaaatgtgtgccattaaacctctaatgaggtctcagtgtttacataagagtcggcattctttggcacaaggtcctccttgagcctctattcagttttatctttctagcctcgtctccgcctacttcctgattataccctatgacagagtgaccatataattttccaaatgggacacctaggtgtgaaaggggccttagtaataattatgttggggaaggaaaaaaaagcataaagcaatagtgttttaggcaaatcagagggaatagtcagctacttctagttctcgccattttgaatgggcctcctgttctctctgcacctgttcctgattgttaccttaggccagaactccacttctcttttaatcaacttaaatttaaatatctttccaaatccaccctctgtaatgctgtgtccatggagggagagatgctttctctttcctcttcctctttttttaagaataaagaacctctgccagtgtgacttacttttccttgttagtgacacagtggcaagtgcacacagtcagccttcctcactgccgctctgaaggcacagtccaggctggagcctgttttcctcacaggctgaccattgtgctgggcccaagtggcatcgctgcacgtttggaaaagtgaatcaatcgactgtgctgggaaggctggtgagggcttggcttgcagaatgtgaatcattccctttaacgtgttgaaaggagtgagaaaaaaaaatgaggtttcgaggtttgaggccagagcctggggttccagtgtggcagtgcagcagagtggttcagggcatgggtgtttccttggggacaactgagactgacttgtacttctgccacctacaacctgtgctaatttaggcaggttactcctttcagttctgcatctgtaaagtgggcacaatgggaggtaccccatggatagtagttgagagtttgaacatgcactctgaataaactgctgtggttaagaccaccaccaccaccaccgatagctggggtgggatccaagaccagagtgtaaaagaaggaaagctggaggaaatgcaggactgaactcatagtctgagcagcagactgaggtgccctgagagaagatggtctccacataggcgtgagtaatcatggtcttttgagaaatcacttcagtagagtaggtaggcaaggcacacatttgtagataccttcatagtcagaggatgaagaaaacaacgtctaggactaggggatggcacagtcctgtgcaaatgtgaaaacctgagcttggattcccagcatatccgtccatccatctgtccgtccctccatccatccatccatccatccatccatccaagctaggcttggtggtgcatgcctattatcctagcactggagatgctgagacgggggaatccctgaggcttcctggacagctagtcttgttcaatctgtaagatccaggtttaatatggagtcatgtctcatgatgatgatgatgtaaaagcaatagaggaaaacacttggacagtagcctctgacctgtgtatacacacacacacacacacacacacacacagatgtacacatatataaagcatgcacacatgtgttgtaggatatttgattacactgtgaactttgagattgtgttatttactagaaaaaaacaaacccaaaacccaactgtttctagttgtggtgtgactcagcccttggcacacacctttaatccctctgggtggaatacagacatgcctttagtatacacctttaatcccaaacaataaaggtaaggtttatttgtagaaggaaacactctagtttggaagtgagttctaactgaggggcaggcaaagtgatggattagaggaagatttgacagaatgagtcagagctaggacacgcccaacttccacacgagagaggaagaggagctgcttaagagcagtgcagagagagagggagaggggaaggaggcaggtttcctgagacagttgcacagagacaggttgaagagaacaagctagacacatgaagacagaacgagccagagaatgagaaggagccagaagatcagaacagatggctagagtgagtttgaggccaagcagaggctgagagagaaaagccatattgagtcagtcagcttggagcagagcttgagccagaacagctgagttgaatcagcctgccagagttcagaagtagaaagggcgagcttattcagcaagactcagaggctgaaatcattctaggcctagataagactgtacgaagtctagaagcttccaggactaggactcagttagcagactgaggcagtaagcctcaaagagaacaattgctacaggaaaataaaaattacatcacacctatgtcatacacacagctacccttagatgacaataaggaaatgtctggaaagaagggaaaacagtggagagaaaggaaaggcaagacaagctagagtcgggtagaactatgttggtttagaaaacgtttcttcaggcagaccatactcttaaaagtaagaagctgcagctggagagatggctaagcaattaagagctctggctgctcttccagaggacctgggatcagttcccagcatccacatggcagcccacagctgtgtctaactccagacctggggatctgacgccctcttctggtctctgtgggcaccaggcatactgcatgtggtgcagaggcagacattcaggcagaacacgttaaataaactcattaaataaacagtgaaaggaagaaactctaggaaataataatccaatcacctatgcagactttttttgatcgtaaactactgattgaaaaatcagtgcctaactttggtgtccgtaacttgctgagagattaaaaacagcagccacaagaaacggctgcagggtggtggcttttcccaaacagaatggagcgaaaatgaagcctggtaggggttttaagggactgggttaggattttggaggaaaggaacatggtctcagttacaaaggtagctttcccataggctgcagtgcctgtttggcctggcgaggctcatctgcagcagtgacaagctaagcttccctccgtagtcctgtgtttcagtacactttctgaaatggctgtgtagacacgcacgcacacacacacacacacacacacacacacacaacactgccttgtgctgaggaagaaaggacacaggttacagaaaagcgccatctcttcctaagagttgcctccaatactcacacagtcctcagaagtcagcactcctgccctgcctgtggtccagcagtctctcctgcacacatcagtttgtttgcagccccagccttgaacttgtcaaactgaccagcatctcatatctgttgctaaacatgtgataggccagcttcaacagatgctaagaggggtcttaaagctaacaaactcaacagtgcctttgcacatgttcgccagctggttaaataggcaattagttgtaccaaataagagagtaggaagtttattttacctgatatggatgctctagtttagtaccgtgtcctgtgttcacctcctgtaagggaaaagtgtatttgcataggtttggggctgtaatactgttctgctatactacgtgtattttcagtaaaaagaaagtcagaattgttttgttttgtttccaaaaacatggaagcaagttgtagcagataaagacaggaagcttggtggtagggttctgagtactggatcttggtggtaggtgtctgagtactgaggcttggtggtagatggctgagtactgctaacaccatcgatacttgtttggttcccttgatataatttgtaaccaagactgattgagaagtgttttttcttatagaatttgtccccatgcctatcttcgtttcctcttcaatgatgtgataaaatgcttagataaaagcaaattgaaggagaaagggtttatttagttcaggattccagattacagttcatcacttgaagcaaatcaaggcagcaggaatgtgaagcagcagccacttcacatccacagtcaagggcagagagcagcgagtcgatgcatctgtaccggtgtgtgttctccgtttcatatagtcctgggtctcaggcagggagtgcccccctgcactgccacccccaacacacacagcggccgagtcttcctaacctcagttacacagtcaaggtcatcccctaggcatgctcagaggcccatctcctaagcgactctgaatgtcaagttaacagctaatgctaagaagatgctggtcttcatttgaaggaaaatctcttctgtttagcccggaggcttcttacttggcatgccaaagtaaaggctgaagtagaggaacagttgatagcatgcttctcatttcttacccacaaaacaaaacacatgatttgcaagattggatatggttttcagtgggcttagagcatctcttacttggctgatagagacttttgaaaacaagaacataaaaatacctttcttggggctggagagatggttcagcaattaaaagccccggctgctcttccagaggacctggtttctattcttagaaccaacatggtgactaccaactgtctgtagctggatctgccactttcttctggcctttagtggtaccagccagagccatacacgctgggaaaacatccatacacagcaaaaggtctaactctgtaccatccacatccacatgaattcattggctggtctttcccaagcgaagctggggctttatcaatgtgattatttcccggacatagtcacgggcaaagcactgcccaggtgacttccatccctttctctctttgccacctcagtggcccctaaggctgagaggacaggcattgtgctgtcactctgcagttgcccagccatgggaggtgcttcctcccgagcctttgttcttgtcagcattgggtgcatctctactccatatgcaccaaaagccaaacctgatgttcagcaagaaagaatgaatcctaatcctggtagccttccagctgcttacaaaccacttcagtcaccgctagttactcctgaagcctcatctcattggagtgtttccccctcagactctccaggaattgcttaaaaagagtagaatccaggtagaggccaccgaactctgtcgctggtggttatataactgtgggtgaatcacagcttaagcaggacagaacatctccagttactggaagttgccaagaatgcagaagccaggcaggccccagtcttcatataatctttgctccccagtgtggaaaaaacccctggggtggagatggagagtgccagccgagcatcgcgtgtcagtggagaagcactcttcagcggcggacggatgcagccggctctcccggttctccggggacagactaggcaggagctacagcataagggagctcggacttgccttagagttgcttgtccaactttagtagattctcctcacagtaatgtggctgatgtgagtcgagtttctgccggacaggggaggaggaggaggcaaggccgccttatcagtgtggttccctgcactcgcaaggacctgtttctgttaatctgttcctgcagacagcatttctcagctgtttacatttgatagcttgttttgcacccggatttattcctgccaacagcaggtgaaaatttgctttcagtgactacttcatttgttcttgttaaggacactttatagcatttataactttatttgaatgccgaactataccttttatatagggtatgagtgtttcccataccctagatctgtgagcctgtagcatcagagagctggttgctgcctgtcagaaagatgtttgacatagatgtagtacttcattgaggtaacatgttttttaatgtccacaatgaggtaaggctggaaagacactgaaaaccccaagagagaaggatgctttcattgtagcgtcagctgctggaagctgggcgttcccagctactcgttcgttttgagatctagaacgcatcccgtgctgtcctctccttaataagcataaactgcttactttgggtagaaacccaccattagaacggagtgttgtcattttatgtcacgcaattaacatgctatctagccatcagaaaatgtaagtcagtgaggttgtctgtaattatctgaagagtgtttctatatgtgccaaagtgtgtgatcaccagttctgtttgatgtcaaaactgttcaaaggaatttcactttaccttagaaactggctgttgtataattgttctccgtgactgggtagtcatttgagggaggaatataatatgtattttttgtcttctttttctagatatactgctgttcttgaacatcatcccattgagaaccccagggtagttcagccaccagcatgtccaagcacaaacttattatactaagacatggagagggccaatggaataaggagaaccgattctgtagttgggtggaccagaaacttaacaacgacggactggaggaggctcggaactgtgggaggcagctcaaagctctcaacttcgagtttgatcttgtcttcacatccatccttaacaggtccattcacacagcctggctgatcctggaagagctggggcaggagtgggtgcctgtggagagctcctggcgtctgaatgagcgtcactatggagccttgattggcctcaacagggagaaaatggctttgaatcatggtgaagagcaggtaaggctctggaggagaagctacaacgtgaccccacctcctatagaggagtctcatccctacttccacgagatctacagtgaccggaggtacaaagtgtgcgatgtgcccttggatcaactgccacgttcagaaagcttgaaggatgttctggagagacttcttccctactggaaggaaaggattgctccggaaatcttaaagggcaaaagcattctgatatctgctcacgggaatagcagtagagctctcctgaaacatctggaaggtactggctttctgtcctgcttcagagcttgctaagagttgtggttgggtcttattctagaaaccgagctacagtgtgctgccctctagcacctcctacctcacgccccttgtcacttcatatttaagaagccattgttctagaaaccagaactcctgtagttcttggtgctcattgtggctgaagctgaggctttcagacacatgcggggagttcagtgtgacggagcggtagggttttggagtttcagaattggggaggtacatctaagaccttgcatttctgagcatttacggtgataactgctgctctgggggctctgcacttttaaagagctctgatctgagggatcacctgccctctgctgtaatgagaagaggctaagaaaggaagcaattttacaagtttattttagccttttaaagtaaattatctagaatccagtttcgtctattttcttcccatgtcaaacaattgtggctgtgttttcagacgtggatttcctgagcagttctttagttgccgttttccagaccaggcttagtcactgcttatgagaatgctagaggggaggaaaatcaaacatatggcttttttccgaatctctgctaaaggagaagactaggggcttctgtttgtctcagtcacttgatgttgagttctaacacaaggactctgggcaatccgttctggggtgccagtgactgagggtgacttcctcactcctgctctcccttctctcacccccacggctgtccctttgactcttgtactccatgtcttcctacagaataggaagggctgaagctctgtgagaaaagcaggggtaggtggctgaccccagagcaatgggtctctgggagatgatggcactgtgaacattttattgtatggctagcttgctctaattgttagggcattatctagacccgattgaccacttagatacctgacatccactagtcatgcggaggtctagaatctacaagctttatcagctgttactgagtttatcggataaccatggtggttatccttttgtgtctgtatataacttacttattcaagaatgtataaggttctattcttaattattcaggaaaatcaaaatatgattaaattatatgtaactgtatcattgacagactataattatttattgttcaaaagagttgagggccctgttagaaaaacaaattgaaatctaaaatttcaatgtttctggcagaatttatattctacacaacttcttttagagagatggtacttatatcatgttttagccaggctcccttccccaaagaaaataccactccttcagggggttccttttagctaggtgagtgagccctaaaaaaaaaaaaaaaaagaagaggaggaggaggaagtttccctgccgtttagtgctatctactcctcacccgtctacacggatgtggctcttgaagatggttctgtatccctagatgcccatcccgcctcccacccccagcagcacatgatggtttactgtttgtgaatgatctttgtaagggagctaggaaaagggcctcaccattggtaatgaaggagtcaatcaccatggtagaggtgaagggaaaatatctgctggaggtgaggttagacattgaaaaaaaggtctacatgccaggtgatggtggtgcacgcctttgatcccagcacttgggaggcagaggcaagccagcctggtctacagacaagctccaggacagccaggggctatgcagagaaacttgtctcaaaaacaaacaaaaaacaaagcaaaaccaaaaatcttgtctacaattaagggaaaattttaatgtattaataattttttaaaaactgtccagtcaagcagtgtaatgtgctctggacaagaatgtgcagcttcctaaaggggtccagtgcactcctctcaagaccagctaccccacccccaccccacacttagtgccctactgtagctgtgaagggcccagagcaggacacctaagacaacagaaattcactttgtgagtctagaagtcgtaagtttgaagggataggcagggctatccttatgtccagcttcacagctctaggtgctggcgattgctggcagtctttggcatttattccctggtatttggacatcattcctgtcttcttcccatgtaacctgtggggttaggggtccttgtccaaatttctttgtgttgtagaaacattcatacatactattgaggcggggtctgcccactgacatcatttgaacttgattgtttcttttaaagatttggttttcaactaaggccacattctgaggtcctggaggttgaagcttcaatctccctccctgtctttgtcccctgtccccgcccctgcccctgcccctcccccccccccttctccaggaacagagttcaatcaacacccaagagaaatgaaaatttccacactaaaacttgtttacaaactttaataacagcagattcataatagccaaaaagtagaacagcttaaatgtccaactaacgaatgggcaaattcagtgttttctagccacagaggaggaggttttctcagcagtgaagaggagtgaagtactatatgcatcgtactggatgaatggtgaggtcattgcattgtgggaaagcgaggcacaaaggattctttataaggtgtccatagtagaggctggagagatgacttggcagttaagagtactgcctgctcttccagaggacccgagttcatctcccagcgcctacgcagcctgtcattccaattctaagggattggatctgtctcttggcatctgagggcccccccacgtgtgtcacatattcatgcagccacacgtgcatacacataaataaagatgaatctttatgtccagaataggtgtaaatctcaagacagaacttagaacacgtgcatacggacaggactggggacgcctggagtctgcgaggacagcgagtgtcttgattctgagttgcttcctgggtgacaaaactgttctaaaatcgattataatgatggttgcacaactctgcacatgtctgaaaagctattgaaatgtacaccttaaatggatagcttatatgtgaattatattttattaataatataacattcagtgaaattcaaaataaaaagggcatgttgttataacgaagaatggcttagggcaagtatagtgaagtgatgctaacacagatgtatatagataatgaatatataatcaggaaggcaaaagcttagctttgactgctgagacagaaaaggacttccagggctttctcagaaaggagcaagcttaggccacagactgcttccagcactctggaatgccttcctagatgtcggccacataggattcagtgagttttcagaggctaacaaaattgaaataatcttatgacttcagtcattatcactgtagataactttaggaaatggtcttattttgtgattctgagctaaggcagtggagttggaatgagaagaaaagacttccttaggaagtcttggggtcaggagcaaggcaaagggtagaagatgtctgcagggaaagagaggcaggtatgaaggagctagagcgtagagatggtgggtgtggtgcaagggagagggagattttccactaggggaggaatgcgcacaagatgcagacagacagacatcagtctgtaaccaggcagcagcagaggaaagtgtaaagggagcgtttggctttggctcttgcacatcccccccccccacacttttttttttcctggagtagcccctgttggaaccactgttagattcatgaagttctttgatgttaccatgccttctcctggttgtggactgcctacctaacatgaggaagttatgtatgcgaaataggttggtttatttcatagagtacttacctattgttttgggaatgctcaaaacacttgtctctgctcgtctaaagcccaagtgttggcacagcttcttaagtgtgggtcagaaacccatacgcaattgaatcctgacataggaccctgtaacaaggtgaggctgtggaaagtctgggagcacgggaaggtttctgagggtacaacaataacaaaattaattccgatccaaatgcataacggctctggggtgtagcgttaccaagcttcattgcagccttggttttgaacacacgaggaagaattaaagggtatcttcccagaatctgaagaaatggtgtcctgaaggatagacagtgtttcttctatatcatctctattaatttgatgagatttcagcattttaaaatttgttatagatgtactcactcaccaacataggagcaccacccttaggcctgtggtcttgtatgtggaatcttgagaaggctaagtttatagggttttctgtgctatttgataaaatatcccattggctttagaagctaccctttctccaaaaaaaaaaaaagaatgactttcttccacttggtagggggtgggaggacacctcacctctctcagaggcatcagagcttacaatgtgtatgtttattgtgaaaatttaccacattgctagtgtacattctatagttgtctgcctcacaagacccatttctgatggatacaaattatcttgatgtaattactattaccttttacttctagagttaccacagatcagccagtaaatgacaaagtcactttactgtatggttgtctttagacttaatgactaaccagaattcattaaaattaacagtctttgcaatgcatacttcctgtattcacaaaagttgccaaacttacattgattaaaaaaaaaaaaaggtaaaaattcttgttgtagatacatctgattctaacccatgctttctgtaggaatacatatttatataaaagtgtcccccataaaataggggtttttaaggacctggggaactttccctgtgttgtccttaaaccacacattaccaattataaaactactttaactgtttgagaactaactcagaggtggggatagtggtgactccagttaaggaattataatattgttctttaatatgctcacaacattcacctgccctcctgtctacaggggcaatgtctgtgtatgtcagctgtgcaagtgttgactttaggatgctttttaaacttctcgtgtatttggtactgcggcattactgcagtcagatcctggctgtgcttagaagacaggacccagggtggtgtaaaaaaaatccaggaaggccccggatggcttggccatgatgaccacagccttcggtcagaattgtcaactctgccccaagaccaatttacttggcttctaagcaggattgcaagcaggagttttttcattttaagttttccccctgaagaatggctcttttccttgcttattctttcttcagaacattacagtgtaagcagcggagtcaagagcatccctagcaggtcgaccagtttttaaaaaggtaacttaatacaaggaaatgagtctttaattattaccgccactgtaacactgtggcccgcgaatggcactccctgggggaaatgagtctttcgttattgccgccattgtaacactgtggcctgtgagtggcactccctggcacagctgtacaaagaggctgtttgtggagctcatgcttcctgccaagcatagtcctagacattttgcacagatatcttgtttcatgtagaaacctgagtgtggcctttagctctctggagagcagtagctcaatattgggttttactctgttgtttactgtctccaaatcctatttctttatttcatgggatcaatcactgatcaggaggcttgacagaagctttagttaaaacaagcaagctttttcacaccccagtaccgtggatgaatccgtcacagcatgctaggtgaagaaacctcagcagagaatgctgcgtaccgcctcggcccacgcatgtggcacgtgggagcgaaccaagctacaaggtccaagcagagctgagtggcagaggcaggctgcatgtctgcaaggcgactcggggtcaggggatgctaggctcttgggcatcgtcactgcaggtgcctacacctttatagacgaagcttaacggagctggctggcaggtgctttagtgttaatgtagtgaaaatggtgcctcagaagagaccggcttcattcagtgtagtcagtaagtgaagtgcccttaatcgggaccttagtttgtgttccacagagtgatcgtctgagtgggattcaatcccaggacccctatttgccaccgtattctatagccatgtgcttccatctgctctctccacatacacacagtggaattagatgaacacacctccctgtgtcttgaaaactcgagtgggcattgttacggccttttcagtcttctggagctgtgtggtgccgactctcttcagtgcctaagccatcagcaggccagggccacccttcaaagttctgcttcatgagatgttacaccgaagatgctggaagagtttgtgtgtatttttatttttatggtgctggggattgacccaaggagctcacaccttccagaccagtgccctgccactgagctgcaccctagcctgaccgtgtattttgttagccttgccagtgttacttatacaggttgtgaagccttctgatggcttttcaatcccagactgatgacctcttatttgtcactgtattctatagccttatgctttcatctgctctttccacttgtacacacacacacacacacacacacacacacacgcacacacacccatacccatctgtgtgcttctaacatcatctagtaaggctagaagtaggttatggacctcttggagtcaatgtgtgtgagcaatacagttgaagacaatgttactggttggaagttagctaacattcttacccgaggatcaccactttaggagcctcgtggcagcatctctgacaggctccctgtctgctgagcctggtctgtaacctgcctagtaacgtatttnnnnnnnnnnnnnnnnnnnnnnnnnnnnnnnnnnnnnnnnnnnnnnnnnnnnnnnnnnnnnnnnnnnnnnnnnnnnnnnnnnnnnnnnnnnnnnnnnnnnnnnnnnnnnnnnnnnnnnnnnnnnnnnnnnnnnnnnnnnnnnnnnnnnnnnnnnnnnnnnnnnnnnnnnnnnnnnnnnnnnnnnnnnnnnnnnnnnnnnnnnnnnnnnnnnnnnnnnnnnnnnnnnnnnnnnnnnnnnnnnnnnnnnnnnnnnnnnnnnnnnnnnnnnnnnnnnnnnnnnnnnnnnnnnnnnnnnnnnnnnnnnnnnnnnnnnnnnnnnnnnnnnnnnnnnnnnnnnnnnnnnnnnnnnnnnnnnnnnnnnnnnnnnnnnnnnnnnnnnnnnnnnnnnnnnnnnnnnnnnnnnnnnnnnnnnnnnnnnnnnnnnnnnnnnnnnnnnnnnnnnnnnnnnnnnnnnnnnnnnnnnnnnnnnnnnnnnnnnnnnnnnnnnnnnnnnnnnnnnnnnnnnnnnnnnnnnnnnnnnnnnnnnnnnnnnnnnnnnnnnnnnnnnnnnnnnnnnnnnnnnnnnnnnnnnnnnnnnnnnnnnnnnnnnnnnnnnnnnnnnnnnnnnnnnnnnnnnnnnnnnnnnnnnnnnnnnnnnnnnnnnnnnnnnnnnnnnnnnnnnnnnnnnnnnnnnnnnnnnnnnnnnnnnnnnnnnnnnnnnnnnnnnnnnnnnnnnnnnnnnnnnnnnnnnnnnnnnnnnnnnnnnnnnnnnnnnnnnnnnnnnnnnnnnnnnnnnnnnnnnnnnnnnnnnnnnnnnnnnnnnnnnnnnnnnnnnnnnnnnnnnnnnnnnnnnnnnnnnnnnnnnnnnnnnnnnnnnnnnnnnnnnnnnnnnnnnnnnnnnnnnnnnnnnnnnnnnnnnnnnnnnnnnnnnnnnnnnnnnnnnnnnnnnnnnnnnnnnnnnnnnnnnnnnnnnnnnnnnnnnnnnnnnnnnnnnnnnnnnnnnnnnnnnnnnnnnnnnnnnnnnnnnnnnnnnnnnnnnnnnnnnnnnnnnnnnnnnnnnnnnnnnnnnnnnnnnnnnnnnnnnnnnnnnnnnnnnnnnnnnnnnnnnnnnnnnnnnnnnnnnnnnnnnnnnnnnnnnnnnnnnnnnnnnnnnnnnnnnnnnnnnnnnnnnnnnnnnnnnnnnnnnnnnnnnnnnnnnnnnnnnnnnnnnnnnnnnnnnnnnnnnnnnnnnnnnnnnnnnnnnnnnnnnnnnnnnnnnnnnnnnnnnnnnnnnnnnnnnnnnnnnnnnnnnnnnnnnnnnnnnnnnnnnnnnnnnnnnnnnnnnnnnnnnnnnnnnnnnnnnnnnnnnnnnnnnnnnnnnnnnnnnnnnnnnnnnnnnnnnnnnnnnnnnnnnnnnnnnnnnnnnnnnnnnnnnnnnnnnnnnnnnnnnnnnnnnnnnnnnnnnnnnnnnnnnnnnnnnnnnnnnnnnnnnnnnnnnnnnnnnnnnnnnnnnnnnnnnnnnnnnnnnnnnnnnnnnnnnnnnnnnnnnnnnnnnnnnnnnnnnnnnnnnnnnnnnnnnnnnnnnnnnnnnnnnnnnnnnnnnnnnnnnnnnnnnnnnnnnnnnnnnnnnnnnnnnnnnnnnnnnnnnnnnnnnnnnnnnnnnnnnnnnnnnnnnnnnnnnnnnnnnnnnnnnnnnnnnnnnnnnnnnnnnnnnnnnnnnnnnnnnnnnnnnnnnnnnnnnnnnnnnnnnnnnnnnnnnnnnnnnnnnnnnnnnnnnnnnnnnnnnnnnnnnnnnnnnnnnnnnnnnnnnnnnnnnnnnnnnnnnnnnnnnnnnnnnnnnnnnnnnnnnnnnnnnnnnnnnnnnnnnnnnnnnnnnnnnnnnnnnnnnnnnnnnnnnnnnnnnnnnnnnnnnnnnnnnnnnnnnnnnnnnnnnnnnnnnnnnnnnnnnnnnnnnnnnnnnnnnnnnnnnnnnnnnnnnnnnnnnnnnnnnnnnnnnnnnnnnnnnnnnnnnnnnnnnnnnnnnnnnnnnnnnnnnnnnnnnnnnnnnnnnnnnnnnnnnnnnnnnnnnnnnnnnnnnnnnnnnnnnnnnnnnnnnnnnnnnnnnnnnnnnnnnnnnnnnnnnnnnnnnnnnnnnnnnnnnnnnnnnnnnnnnnnnnnnnnnnnnnnnnnnnnnnnnnnnnnnnnnnnnnnnnnnnnnnnnnnnnnnnnnnnnnnnnnnnnnnnnnnnnnnnnnnnnnnnnnnnnnnnnnnnnnnnnnnnnnnnnnnnnnnnnnnnnnnnnnnnnnnnnnnnnnnnnnnnnnnnnnnnnnnnnnnnnnnnnnnnnnnnnnnnnnnnnnnnnnnnnnnnnnnnnnnnnnnnnnnnnnnnnnnnnnnnnnnnnnnnnnnnnnnnnnnnnnnnnnnnnnnnnnnnnnnnnnnnnnnnnnnnnnnnnnnnnnnnnnnnnnnnnnnnnnnnnnnnnnnnnnnnnnnnnnnnnnnnnnnnnnnnnnnnnnnnnnnnnnnnnnnnnnnnnnnnnnnnnnnnnnnnnnnnnnnnnnnnnnnnnnnnnnnnnnnnnnnnnnnnnnnnnnnnnnnnnnnnnnnnnnnnnnnnnnnnnnnnnnnnnnnnnnnnnnnnnnnnnnnnnnnnnnnnnnnnnnnnnnnnnnnnnnnnnnnnnnnnnnnnnnnnnnnnnnnnnnnnnnnnnnnnnnnnnnnnnnnnnnnnnnnnnnnnnnnnnnnnnnnnnnnnnnnnnnnnnnnnnnnnnnnnnnnnnnnnnnnnnnnnnnnnnnnnnnnnnnnnnnnnnnnnnnnnnnnnnnnnnnnnnnnnnnnnnnnnnnnnnnnnnnnnnnnnnnnnnnnnnnnnnnnnnnnnnnnnnnnnnnnnnnnnnnnnnnnnnnnnnnnnnnnnnnnnnnnnnnnnnnnnnnnnnnnnnnnnnnnnnnnnnnnnnnnnnnnnnnnnnnnnnnnnnnnnnnnnnnnnnnnnnnnnnnnnnnnnnnnnnnnnnnnnnnnnnnnnnnnnnnnnnnnnnnnnnnnnnnnnnnnnnnnnnnnnnnnnnnnnnnnnnnnnnnnnnnnnnnnnnnnnnnnnnnnnnnnnnnnnnnnnnnnnnnnnnnnnnnnnnnnnnnnnnnnnnnnnnnnnnnnnnnnnnnnnnnnnnnnnnnnnnnnnnnnnnnnnnnnnnnnnnnnnnnnnnnnnnnnnnnnnnnnnnnnnnnnnnnnnnnnnnnnnnnnnnnnnnnnnnnnnnnnnnnnnnnnnnnnnnnnnnnnnnnnnnnnnnnnnnnnnnnnnnnnnnnnnnnnnnnnnnnnnnnnnnnnnnnnnnnnnnnnnnnnnnnnnnnnnnnnnnnnnnnnnnnnnnnnnnnnnnnnnnnnnnnnnnnnnnnnnnnnnnnnnnnnnnnnnnnnnnnnnnnnnnnnnnnnnnnnnnnnnnnnnnnnnnnnnnnnnnnnnnnnnnnnnnnnnnnnnnnnnnnnnnnnnnnnnnnnnnnnnnnnnnnnnnnnnnnnnnnnnnnnnnnnnnnnnnnnnnnnnnnnnnnnnnnnnnnnnnnnnnnnnnnnnnnnnnnnnnnnnnnnnnnnnnnnnnnnnnnnnnnnnnnnnnnnnnnnnnnnnnnnnnnnnnnnnnnnnnnnnnnnnnnnnnnnnnnnnnnnnnnnnnnnnnnnnnnnnnnnnnnnnnnnnnnnnnnnnnnnnnnnnnnnnnnnnnnnnnnnnnnnnnnnnnnnnnnnnnnnnnnnnnnnnnnnnnnnnnnnnnnnnnnnnnnnnnnnnnnnnnnnnnnnnnnnnnnnnnnnnnnnnnnnnnnnnnnnnnnnnnnnnnnnnnnnnnnnnnnnnnnnnnnnnnnnnnnnnnnnnnnnnnnnnnnnnnnnnnnnnnnnnnnnnnnnnnnnnnnnnnnnnnnnnnnnnnnnnnnnnnnnnnnnnnnnnnnnnnnnnnnnnnnnnnnnnnnnnnnnnnnnnnnnnnnnnnnnnnnnnnnnnnnnnnnnnnnnnnnnnnnnnnnnnnnnnnnnnnnnnnnnnnnnnnnnnnnnnnnnnnnnnnnnnnnnnnnnnnnnnnnnnnnnnnnnnnnnnnnnnnnnnnnnnnnnnnnnnnnnnnnnnnnnnnnnnnnnnnnnnnnnnnnnnnnnnnnnnnnnnnnnnnnnnnnnnnnnnnnnnnnnnnnnnnnnnnnnnnnnnnnnnnnnnnnnnnnnnnnnnnnnnnnnnnnnnnnnnnnnnnnnnnnnnnnnnnnnnnnnnnnnnnnnnnnnnnnnnnnnnnnnnnnnnnnnnnnnnnnnnnnnnnnnnnnnnnnnnnnnnnnnnnnnnnnnnnnnnnnnnnnnnnnnnnnnnnnnnnnnnnnnnnnnnnnnnnnnnnnnnnnnnnnnnnnnnnnnnnnnnnnnnnnnnnnnnnnnnnnnnnnnnnnnnnnnnnnnnnnnnnnnnnnnnnnnnnnnnnnnnnnnnnnnnnnnnnnnnnnnnnnnnnnnnnnnnnnnnnnnnnnnnnnnnnnnnnnnnnnnnnnnnnnnnnnnnnnnnnnnnnnnnnnnnnnnnnnnnnnnnnnnnnnnnnnnnnnnnnnnnnnnnnnnnnnnnnnnnnnnnnnnnnnnnnnnnnnnnnnnnnnnnnnnnnnnnnnnnnnnnnnnnnnnnnnnnnnnnnnnnnnnnnnnnnnnnnnnnnnnnnnnnnnnnnnnnnnnnnnnnnnnnnnnnnnnnnnnnnnnnnnnnnnnnnnnnnnnnnnnnnnnnnnnnnnnnnnnnnnnnnnnnnnnnnnnnnnnnnnnnnnnnnnnnnnnnnnnnnnnnnnnnnnnnnnnnnnnnnnnnnnnnnnnnnnnnnnnnnnnnnnnnnnnnnnnnnnnnnnnnnnnnnnnnnnnnnnnnnnnnnnnnnnnnnnnnnnnnnnnnnnnnnnnnnnnnnnnnnnnnnnnnnnnnnnnnnnnnnnnnnnnnnnnnnnnnnnnnnnnnnnnnnnnnnnnnnnnnnnnnnnnnnnnnnnnnnnnnnnnnnnnnnnnnnnnnnnnnnnnnnnnnnnnnnnnnnnnnnnnnnnnnnnnnnnnnnnnnnnnnnnnnnnnnnnnnnnnnnnnnnnnnnnnnnnnnnnnnnnnnnnnnnnnnnnnnnnnnnnnnnnnnnnnnnnnnnnnnnnnnnnnnnnnnnnnnnnnnnnnnnnnnnnnnnnnnnnnnnnnnnnnnnnnnnnnnnnnnnnnnnnnnnnnnnnnnnnnnnnnnnnnnnnnnnnnnnnnnnnnnnnnnnnnnnnnnnnnnnnnnnnnnnnnnnnnnnnnnnnnnnnnnnnnnnnnnnnnnnnnnnnnnnnnnnnnnnnnnnnnnnnnnnnnnnnnnnnnnnnnnnnnnnnnnnnnnnnnnnnnnnnnnnnnnnnnnnnnnnnnnnnnnnnnnnnnnnnnnnnnnnnnnnnnnnnnnnnnnnnnnnnnnnnnnnnnnnnnnnnnnnnnnnnnnnnnnnnnnnnnnnnnnnnnnnnnnnnnnnnnnnnnnnnnnnnnnnnnnnnnnnnnnnnnnnnnnnnnnnnnnnnnnnnnnnnnnnnnnnnnnnnnnnnnnnnnnnnnnnnnnnnnnnnnnnnnnnnnnnnnnnnnnnnnnnnnnnnnnnnnnnnnnnnnnnnnnnnnnnnnnnnnnnnnnnnnnnnnnnnnnnnnnnnnnnnnnnnnnnnnnnnnnnnnnnnnnnnnnnnnnnnnnnnnnnnnnnnnnnnnnnnnnnnnnnnnnnnnnnnnnnnnnnnnnnnnnnnnnnnnnnnnnnnnnnnnnnnnnnnnnnnnnnnnnnnnnnnnnnnnnnnnnnnnnnnnnnnnnnnnnnnnnnnnnnnnnnnnnnnnnnnnnnnnnnnnnnnnnnnnnnnnnnnnnnnnnnnnnnnnnnnnnnnnnnnnnnnnnnnnnnnnnnnnnnnnnnnnnnnnnnnnnnnnnnnnnnnnnnnnnnnnnnnnnnnnnnnnnnnnnnnnnnnnnnnnnnnnnnnnnnnnnnnnnnnnnnnnnnnnnnnnnnnnnnnnnnnnnnnnnnnnnnnnnnnnnnnnnnnnnnnnnnnnnnnnnnnnnnnnnnnnnnnnnnnnnnnnnnnnnnnnnnnnnnnnnnnnnnnnnnnnnnnnnnnnnnnnnnnnnnnnnnnnnnnnnnnnnnnnnnnnnnnnnnnnnnnnnnnnnnnnnnnnnnnnnnnnnnnnnnnnnnnnnnnnnnnnnnnnnnnnnnnnnnnnnnnnnnnnnnnnnnnnnnnnnnnnnnnnnnnnnnnnnnnnnnnnnnnnnnnnnnnnnnnnnnnnnnnnnnnnnnnnnnnnnnnnnnnnnnnnnnnnnnnnnnnnnnnnnnnnnnnnnnnnnnnnnnnnnnnnnnnnnnnnnnnnnnnnnnnnnnnnnnnnnnnnnnnnnnnnnnnnnnnnnnnnnnnnnnnnnnnnnnnnnnnnnnnnnnnnnnnnnnnnnnnnnnnnnnnnnnnnnnnnnnnnnnnnnnnnnnnnnnnnnnnnnnnnnnnnnnnnnnnnnnnnnnnnnnnnnnnnnnnnnnnnnnnnnnnnnnnnnnnnnnnnnnnnnnnnnnnnnnnnnnnnnnnnnnnnnnnnnnnnnnnnnnnnnnnnnnnnnnnnnnnnnnnnnnnnnnnnnnnnnnnnnnnnnnnnnnnnnnnnnnnnnnnnnnnnnnnnnnnnnnnnnnnnnnnnnnnnnnnnnnnnnnnnnnnnnnnnnnnnnnnnnnnnnnnnnnnnnnnnnnnnnnnnnnnnnnnnnnnnnnnnnnnnnnnnnnnnnnnnnnnnnnnnnnnnnnnnnnnnnnnnnnnnnnnnnnnnnnnnnnnnnnnnnnnnnnnnnnnnnnnnnnnnnnnnnnnnnnnnnnnnnnnnnnnnnnnnnnnnnnnnnnnnnnnnnnnnnnnnnnnnnnnnnncaccctagcctgaccgtgtattttgttagccttgccagtgttacttatacagggttgtgaagccttctgatggcttttcaatcccagactgatgacctcttatttgtcactgtattctatagccttatgctttcatctgctctttccacttgtacacacacacacacacacacacacacacacgcacacacccatacccatctgtgtgcttctaacatcatctagtaaggctagaagtaggttatggacctcttggagtcaatgtgtgtgagcaatacagttgaagacaatgttactggttggaagttagctaacattcttacccgaggatcaccactttaggagcctcgtggcagcatctctgacaggctccctgtctgctgagcctggtctgtaacctgcctagtaacgtatttctattagagatcgatttacgtgtaatctgagaatgcttaatattttcagaagacaaacaaggcatgggatactatacagtaagaaaattcccccagggactgcttcactggttttcagaaccataaataattgcctacaatcttgtcagtaagtccaggttaaagccgatctcgcccctgacagttgtgcttctcacaacgctgcaagagaactttgaatgcccgcgggagagctaaaagcaacctgttgtgcacagttccagacaggcgtgtgtttctttttcttgtggttggcatagttgcttcctgtttgtttcctgctggtccacactgaaggaaaagccgagtacctaactgagtgttggatgtggtctgtaccttgccagaggaagtagattgtttagtctggtttaagcacaggatcaggcagatgcaagacagggataaagagtggcggcaagaaatttgtataagacttggactctgtccctggagaagtgtacacagctgcacacacagcaagtcagacacaaggtgacgtgaaatgagagaaatgagaggaaaggtcagctagagctggctgccaatggcggctgaggtgtttgtcacctttggcatttagtaggatattttcagaatcatggagttcaagccctctttcctgggagacaaataattgcttagtggtagagctgagctagcttttatgcaagcctacaaaatctatagtagcctttattcttaaatagcgtaagattttaactgtaatttaactaaacaaattaaattataattatttgaatacattatttaaattataagtgatttaagtgaataaatttggtaaattatagtgaatgaaaagttaactaaaactgaaaggtgaattcatctctctcttgcttaattttaaagcagcagctattaccctgccatcaggttacagggtaatttaataccctgttttctttggtttccccaggctatcttttaattgtatgtatgtgaaactaaaaatttaaaagtctaaaattaaatttacttgtatggtcacctgtaatggacagtctcttctttcagcccttactgataatagaagaatacacagcgtcgttgtcccataggtccagtggggacaaagaggggtgggtgggggtctcacagttggctgccaccagattcactgaaactgggtggtgtttttgcttttttgtttttaatcctaaaatatgggctttcctttcgtcctgtagcaactcctcctgtgtccctgagtgctgcttttccccatttcctgctgctaaaagatttgtaggcattttagagaaaagccaaagaacacacagaacagatttgtgcagtttgcttgattagcactaggtataaacaacttttttgttccaggctaagaactgtttaaatgcacctcccacacctcgtttcttgctcagttcataatgagaaaagtctttaatcaaggcttcaacaataaagactagacttgaaagccaagaaagttagaattcactcagttcaactgtatgcccagggcccagtgattcaagtcctgcttttggcccaggagctagagtacacatgaatgagtgagacacacaaggtcctgcctatggtggatcctatgtgccccttctgatctttcagaaatgtcacccaaaaatgcacatctgatatgaccttccttggagtgctctcatgcaaaagcctgttgctggggaatctttaacctttattccttataacctgcaatcccatgtaaaaagtgcattcttggtggatccagtggtgacatacctaatgtatctgacggaccatatagctccatgttttgtgcctcctagcaggcaaccttcgaaagcactgctcacagatgcacagattccagttatattcttgtaaggatggtgaggcactgcccggagagctggagtcacagagcagagttctcattctggcagaagccaggatttgttcaagtgcttctcccagaggtgttgggtggggcattgtggttgaagtacagtgtcctgtgttctagtttgttaccatgacttagagggagtgccggcaggttgactttcttttttttttcttcttcttcttcttcttttttttttttttcagttttccgagacagggtttctctgtatagccctggctgtcctggaactcactttgtagaccaggctggcctcaaactcagaaatccgtctgcgtctgcctcctgagggctgggattaaaggcgtgcgccaccacgcccagcctgcaaattgactttcggaagctactcctgcacgtagaaaataagttatttaagttttccattttgggtatcaatttactcacatggttttctcctaaactttcgttctttcttatctgaaatgcttccaccatttccagtggttgcagtgggtttcgagaagctcctgcatagagactggagaattaaagatgctctaggtattccggtgcttgcctatggtaggctcggccctccagaggctggggtagaaaatttccagttcaaggcaagcctgtgccacatagttaaacgctgaagacaccaggtgtaaagtgaagagatggcttcagagggactgtgatggaaagaaggtagagagagaaagaacctggtgccatttccaagaaggcgctcttggacttggttaaacgtgaactggagactgggggtggtgttctgctagaatgtgtgaagccctgccttttgatcaacagcgctgcataaaactgggtgtggtggtgcaggcgtcnnnnnnnnnnnnnnnnnnnnnnnnnnnnnnnnnnnnnnnnnnnnnnnnnnnnnnnnnnnnnnnnnnnnnnnnnnnnnnnnnnnnnnnnnnnnnnnnnnnnnnnnnnnnnnnnnnnnnnnnnnnnnnnnnnnnnnnnnnnnnnnnnnnnnnnnnnnnnnnnnnnnnnnnnnnnnnnnnnnnnnncattttagcttctgtttggtggcccagtggatggatttttaagagtataaatgcatagcatcttttgctggtttggtttggggcagtgcagcggggaagttctgtttacttagctttcctaggatgaagcatttagtatatgccaacttttagtaacaagcaatggcttccctgtggttttcttaatttgctattttaaaatgtcagccgcttaggtctcattgactgattagtaaccagtctaagcattttaagaatttgtaagtaattagtttactctgtgaatagcttgaggcattattaaaatagaatgttaacttcattggaaactttttttttaagttctctttctgttagtggcatgctatagtctggaggcctttgtttagtggactcacacagggatgagtcattaaataaaagcaaaccttgggcaaggacttggcctgctggctcctgttgcatcgaagtcaaaccactgagtcccctgtgatgcactccagcttcctgatgcaaacctagaacatgtttctgagatcgcacaggtgacctctagacctggccatctgcttcctgggcttagctgttttaagtcagacagacttgctcctccctgtttcctgtgagaacactgggactgatgtccagttagcatgcagcctttaccagagctgagcaaaaattaaaacattctctttcaccttcagtgttagaaacagcagtaaacaatgcagaagaccagggtttaagtgctgactgcaaggacagctcagtttttatagacttaaaagccttgagacttgaacaggccttttggatctgcttagtatttttgttaacagctgtagtgagctaaaacccacatgtaactgcccctgagagtggtttttagtgtgtagttagttgtacaagtaactgtagaggatggttccagacgtccctgcagttaacaaaaatctgtaggtcgatgttcaagtcccggtgtgaagcaggtggtgtctgtacatagctgatgcatgttgcctcctactcctcagattgtctgtggcctcgaactgtgggaatcggtgctctactctgatgcagggagtggcaaggggaaaaggtttcgactggtgcagatgcatttgtttcccgacagtttccattggtgaccgattgaatccgtatctgagggtccagtggatgtgagtgatgtccacggtcctcgatccatcgacacagtgtttataagtaaggaccagagacagtgctgatcaaggggtattaagtcgcagctgtagcagaataagaagttctgttgtgttgttgcatacgtggtaggacgacagcagctgagttatgttcaagattgctcagaaaactagaagaaaggatttggaatgtttttattgtaagaaataatgataataaaatatgtaagttatgcttagcttgattcaaatgtagatagattcttctaattttttcccaaaggaaactgctcctccaatggcaatgtctggttctcccagccctgggcagctgctaatccacttgcgtcactatgggcttctctgctctgaacattttctgttgatggagtcatacaataagtagtctttttgtgactggccttttaaaagccatttacatattgttggggacagaacccaaggccttgtgggctttatgcaagcactactgaaagctatattccagcactttaaaaaaaaacttactacagtgttttccatatcaataacatatatcagtgtttcatccctgttcaaataatattccaccatcctgcccagtcacactcatctgctcactagttggcagcaatttcagtgtttctgtattttggctattatctgtaatgctgctgtggagatttatatataacttttgatatggacatatgttctatttctcttaggcatatgcctgaggtattttcagactgttttcccaagaagctatagccttctgatctcctgatttcatcctgtattatacttataatctccccacatccttgataatgcttgttgataatctgcctttttgctgtgttcacctcactgacgcgaacgggcatcatcttgtgggctggaactgcatctccggaaagaccagggctgctggtcgtccttgccagcgctttctggtttatccttggagaaatgtctgctcggatcttttgcctgttatttcactgccactcatcttttcatgtctccttttatctttctcaggaagatcttatttctaaaagctacattcttggtagtgttggggatggaatcctaggtcctgtgcatcctaggcgagcactgtcactgggcttcagtcccagcccatgtgtgtactgagggaattccgaggtgttggatcccctcaggctggagtttcaggtggtcatgaactgccaagtgagtactgggaactgaacttggaagagcagtaagtgctcatagccgctgagccagctccccggacactgtcttaattttgaggcatagtagttctttgtgtagtcttaatgcacgtccctatgattttgtaaaaataaacaaaattatcctactctctgtagtgtcttttcatcttcaaagggcaatggtgccctttgaacctgacaattgaatacacagatttcatttttcttctcttctgttgctgtgctttcgtgttgtctaagaagccattgtcctaattcaaggactttgctcctccctgtgtgcctgtgtgtgtcctgttgagaaggttacccctcttgctcttacttgcctcagtacacgtgttggaaattagttgattgaaactgtgaaggctgattttgctctcacttctcacctgctgatctgttgtcggtccttactgcgagagctgtgtagcgtctgcgaggacggcactcttccgcagtctagagctccttaggaagttttgagagctaacacggtgccttcttgtctattaaggattaaatagagtgattttggtgctgaagggcactaccctctctcttcannnnnnnnnnnnnnnnnnnnacgaagtttaacggagctggctggcaggtgctttagtgttaatgtagtgaagatggtgcctcagaagagaccggcttcattcagtgtagtcagtaagtgaagtgcccttaatcgggaccttagtttgtgttccacagtgatcgtctgagtgggattcaatcccaggacccctatttgccaccgtattctatagccatgtgcttccatctgctctctccacatacacacagtggaattagatgaacacacctccctgtgtcttgaaaactcgagtgggcattgttacggccttttcagtcttctggagctgtgtggtgccgactctcttcagtgcctaagccatcagcaggccagggccacccttcaaagttctgcttcatgagatgttacaccgaagatgctggaagagtttgtgtgtatttttatttttatggtgctggggattgacccaaggagctcacaccttccagactcttgcgtgcgcccaactggccaggaagaacgacgctgcaacaggatctttctgcacacgtttattcagtcctgtttcttcttgtttatatctcccttgtttatatctcccccgaaccctgggcctctcactcttttatactctcagttcccatccacgcacagcaggccacgccaccttaccaggcacgcagcttcgctaatcagggcagcaggggcatatctccatcaaaatggattcaccggtatcctggtacacatgcgcagcactcaagatgtttgtgtcttatatgaggaagtcaggtgcaagtcatatgacttagctgcagtccctggcgcctttgggactgccgccacacccgctccccacaccagaccagtgccctgccactgagctgcaccctagcccgaccgtgtattttgttagccttgccagtgttacttatacaggttgtgaagccttctgatggcttttcaatcccagactgatgacctcttatttgtcactgtattctatagccttatgctttcatctgctctttccacttgtacacacacacacacacacacacacacacacgcacacacccatacccatctgtgtgcttctaacatcatctagtaaggctagaagtaggttatggacctcttggagtcaatgtgtgtgagcaatacagttgaagacaatgttactggttggaagttagctaacattcttacccgaggatcaccactttaggagcctcgtggcagcatctctgacaggctccctgtctgctgagcctggtctgtaacctgcctagtaacgtatttctattagagatcgatttacgtgtaatctgagaatgcttaatattttcagaagacaacacaaggcatgggatactatacagtaagaaaaattcccccagggactgcttcactggttttcagaaccataaataattgcctacaatnnnnnnnnnnnnnnnnnnnngtgatagctcatctccccatagggtggtaatagtgaatacatgagttatttacacataacatattacgtgcctagagaagtactatcctgtagagtgttgccaggattttagatgtttaagttaaaagcagttgtaaaaataaaaatttacaaccacagccactactgccatccctattcctgtagtcaaagatggattatctgtaattatcttatattaaaaagttttaaatgtgaccttctttccctccccacacacaccttcctctggcgatgttaagggcagtaggagaaagaggccttgtttataggcatcctggaaagttttttcctgagtcccctgagctgtgcttcctctcaaacccattaagtattggaaaattaaccacattctaatcaagtgaattagttagattcagtgcttaatgaaaaaccctcatcttaagactagcattcagaagacagttgtctgttttcttttcttcggtttggataagaaacagccaggaacaggtcgcctcagaaggaacgttcaattccaagacctagcactctgtctagtctccctcgtctgttatgtgtctgtgtctggaacgataggtgtggcccctcatggttttgggcccacggttgatatgggacaagttcaatgtgtagtccgacagttaaacagaccatcctgccaagtttgtctaacaccttgtttcttctctcctgcgcgacaggtatctcagacgaggatattatcaacatcactctgcccactggagttccgattctgctggagttggatgagaacctgcgtgccgttgggcctcaccagttcctgggcaaccaggaggccatccaggcagccattaagaaagtggatgatcaagggaaagtgaaacaaggcaaacaataaagtgtggccaggaacgagtttggggtggcatgcagtgtgttccgagcgggcttctccccctcctccgacgggccccctctccctaagtctaggctgtgtggtagagtttgtgtaggtaactaggtaatttatcgtggcccagacgtgaccttcgaatgctgaagagctttgtctgaagcctgaatgaacttttctgctcctcccgtttgaattaactttgcaaagtagtagccagcggggggatttgaccagggtggttttgtgttttggagacaggagagtaacaagtggagatgaaattgtttatccttaacaagtcattgcagagtcaccactgacaggtgctattccagtgagcaggtcaccgttttattcaataatacttctcgagaagactactaggtagcacttgggcagtttagatcagaggcgcgtcgaatggcagagtcacaggcgggtccgagggaaggcatctgagcgccacagtagcacaaggccctttgatgtctagcccagtgccatcctgtctgccgtcagtagaaaccaacttcagccagttagaaggaccagggtatgcacagtggtagcagtttatatccttctgtttcatttttaacttttgaactttaatctttggggacttcacagtttaaaataaagctttgtgactgcatacaacacgcgcaaggtgcctcgagtgtgtgatgaatttcagacgggcctctgagcttgtcctggccgccgtctcctgtagcactcctaaggttacattagttgagcacaacccacccctgaagtgaaggctggctgggggaagttgaccgtggtgcgtgtgattttattcacctgagcaggctgacagcctgtgagagcgtctgctgtatatctgctgttcctcggctaggtacaaaagattacagtccacatcctagtttaggtgggctgtgagcagaagtgaagtgtgttcaggtgctgtgtgacagctgccgtttctttaggctgttgcctccctgaaagcaagtcctcgatattccagtgacagtcatgcacacattttgcagacatagtacttacgatagatgttaccatcttttcatgcttttttccaggagtgggttaatttacttgtatccattttataataaaacgggcctttggtggaaaccagttctaaatcattgctgcggcttggtatccagcttggtttttttttttaaatctggttttttgagacagggtttctctgtatagccctggctgtcctggaactcactttgtagaccaggctggccttgaactctgaaatccacctgcctctgcctcttgagtgctgggattaaaggcatgcgccaccatgcctggctggttttggtttttgattcagcatctttagggactggcagaaaagatggctacagagataaacaaagaaagaaagcatttggaatcttagagacgtctctaggcgattttgccagtgctttctgatatttactgggttttgcgatttgaccgaaatatttgtgagcagaaggaatatttatggagggaaacttacataaaccaactgttaacagctgcagcgctccagcctcccgaccagccagtgaagcagttctctttgccttggtaacacggatctgggatttctggaagtgggtctgacctgcatcctaatctcggcctctctctgaaactgggacagacatgagcagtttttttcttctaaagcaaaggatgacagcctcgctataaatgtccctggagtaagtcactgtgggttccctggggccagcttgacaggtctcctctgctctgttcagtgtgctaagacgaggcagaagccaagccagcagcaccttcgctgtgtcagctgagtggagcatcccacgacactacagacgtgtcttttcaaaagagttccgttccatccagaaattgaatgttttagcactgagagtaatgttgccattgagatgacgacgccccctccgataggatgctttctggtgtgcaagaaaaccatcgtgatctattcccaaggcgattcttgcctccaatcagccagctgtttctcatcttaggcccttgccctctcttgttgaagtgcagggtcttccttcctgtcggccatttgtttattctagcagaggtttcagatcaagcagccaccttccccatgggcacttggtactgtatatactgaaaataggtctgtattttctcagtcccttcctgacgttgacgaaatgaactcaaggaaagcagccttccaaagacagaagacttctcatccacgctgtcagttttagccatttttagtctgtggcgacacataatcttcataaagttcagctccccataggaaaaagggttcccttctctcagaaccaccccgccatttcctcaacacggcaggtcctggtcatattttctgattttatcttttgtgtgattggcttgatacaaattttgggctcctttagtgcatttgttgcaataaactgccttgtctcccaggagatctagttgtggccactgaatccaaggcaaatatggaacataaaaaaataagacgagtttaatgatccaatttttaatggcaagttatttgacagaattaaaggttgaactgaagtgattctataactgatagttgtatttatccaggagtgttgtggttgaatgaaacttaacccccaatttcccgtgttgatgctttttggaggtggggccattaggtaattaggattaaatgaagtcatgggggtggggcctgatggtggcattaatgctttatcttaagagaggcctgaagtgttgttgtggctccagtttggcatgtctgctctgctgtcaccatctaggtccacaccagctcctagcttttggcccatctagcctccaggaccatgaactaaattagcctctctttgtaggcagtaaacatagtaacagaaataaagaaggcaaggtggggtagctctttagtctttaagatcttagaacggttaagttgaacccaacgtgttatgttacttggacaagtttctgtgtgtctgtgtgtccgtcttcaggaaggacctctcgatggtttggagcttaagaagcattcgaggttggctgcccagtccctcacctccccaggactgggataacaaatgtgtgcctccatacccagctgctgctgctcctcctcctccactttcttcttctcctccctcctccctcctccttccttccttccttcatgggttctgtggtcggactcatcgcttgtgctatctcccaagttcctaccttgacaaagttttaaaagcagacgagagagcagcagcactgctgtgtacacacagtaaaaccacaacctaatctcttatctgagttagggctaactgtttattgtaaattgccagtacactgaaaatctttttataacaaagaactttagtgtagcataaagggttctcccatggtggtcacattgctaccatgaccacttacagccaccgccatgctcctcatttcttgcctccatccccactgaccatgttcaatccaaacaagacaaagagcttggccttctcaggtaaagtgaaagttgctggtgtccgttccttcctggttgctccatagaacccaaaagcagctctgccaaggtattgtaactcaggcttggacctgtggatggtctgtattatttctgactgctgtcgagaggccttttggcctgttaggtgtggtttctagaggaccacatgagtcccttcaacatgaaatgtgttcagagataatgttgcagcgacgcctcttagcttgctgtgtgtgatttgtgtggaacattgtgattacctcccagatggcattgtagagattaccatccctgcaatgactttttagtactgaaggtgaataaatttaccaatattataaatctcatgacatcatggaagaagagagacatgagacagaaggcggcaaagatggcccctttgctactgttttgaactggaggcatttgtttggacatgggtatatattttaatgtgtatattccctgttgccaccagccctgccaacttggatcctctgaaagggccaggcatccataacccactaatccttagcatatctgaggccctttgatcttcgttcctaagtccttttacacacaactgggagtatttagggtaatggttccagatctgaaacagacggggacaaggtaagcctgaagcatctctaccagcagaaaagagaagttccctgagactgatgggacagaaaagttggcctgaaggtacaaatttggaacagtttaagaaaattaattttaaaaacaatgctgatagtgggttataggacattttaagaataaccagtgacaccatagattttaaagagaggaacagaatgctacaattttctaaaatgtaaaaataattgccaggaggaaacacttgatacatacagctttgtgttgagttcagtcctgaaatgtgctttattgtatgaagtgggcagacgaaggcagctgggttctttctcttttgtcgtgaacccagtcctcggtagataacggagatagaaagccttaacctttattaattgggtatagcttatacactcaggctggtgagatagctctggcaggaaaggcgcttactgctaagtctgggggtggcatggctggcagagagaaccagccccccaaagttctgttctcttccacatgcatgctgtggcacatgtgcacacacacgtgcacacacatgtgcacacacatgtgcacacacacactaaaaaatataacaatagctggattgtcttgtcacttttttcgcctttgaagctacagctatgtagcagaccaaactagcttatctgctgatgtaactcatcagaaatatgataaacactgacatcttttagttgactaataatgacatttctttcctgatgcaaatatttttatatttttttctccatagtatcttgaagtgatgtgacttcttgatgctactttgtggcacctaaattctatttaatctgcactccctacatcaggcacctctcagatgtcccttctgtcactcagctcagtgtcctagtcagcttgaatctagctgactaggaaacagccatcattcctggtgccgagacctctgagcatcagtggcctgaaatggaggcacctcattgcctgcgacagaagccaagagtgttctgccagatgctgtgtgtgttcatgtgtgccaaggccttctcatagccagaaaacacttttttttttttttgtagtcaataattgcctctgctcttatggtctttccatctcctcttttgtgatttttaacccttgagaggaagggaagatcgcacatgcctaactgtagtacacagagcagtcaagctatttcagatctggaagtttattcccactggcttagctttcatagtgatataaggcgctatgctcattatgggggtgagaaaaaaaataacagttttacccagctgtgaaccctgaaagctacagcaacattttgcctggcaaaatatgcccactggagcaaccctggtacaaatgttataaaggtaaccaaccactttctgaccggatgccaggcccactctagaatatgtaacccatgcctggcaccattaactgatccaagaacccatggctgggtagagcataggttctgaggagaacatactcacaaatagtatgtcaagtatacatagttttaacccacccccagtgttcagtacttaactttgtgcacataggttgatgatcagccctcatcaaataagctgctttttgcaatagatggctattaatagagaaacccacagtgaaccaatgtatagaatgagagactgagaagtactcaacatttttattaaatttatacagggatacatgcgtgccacggtgcatgtaacattggggactgggttctctccttttatggtgtgagttccaagaatcaagctggggttatcaggcttcaaacaggccactgggcttggtggcagataccgtcacctgctgagatatcatgaagacctcaatgcattcatcggtttagatcagaatcctcacaattcatttacttccccaaagccccatcttttaaaaaaaatccttgatttcctttttatttcgtatcttttaattaatttaaataatttagtatattcagatataatttgtaagtatgtaaattcaacctgttgagttcgtgtttactgtggcctgcatgtacctgatttcaggctaaccacttggtgtgtaaccaatcagaggacctattttcccttggcagtgatcagttgcctggagttcttagtcttgggttggggccccatcagatttcccacattgttagcataatcattggtattgtcattattcaccaaagccctatcttaacaaaggtaagttgggggaggggggcatttcacatccaaactgtaacatctaagcattctcactttgaaaactggagtttacgaaaatgaattcattttcttgagatgtgacgtcagtgtacatccaaagtaccaaagaaccagcccccaaaagaaggagccattcacgagcaaccctgctggtgcttagccaggattctaaatggctactctcctcaagaagaagccaccacagccgaagaagctgctgcccaatttacttaagaagtttctatgaatggagtagtagagtccgccactcaattgagaagggaacatctgcccagttgcctcacttggcacctccttgagggaaatctccactggaagccttattgaactaggtgggctgtcagatgaagctagaatttttatcagtcaatctactatttcacactgataagattaagaagcagctgagattggaccttggcaaatatcagcagtgcactagaggggggaagctaacacaagttctgtactcacaatcgaggccattgatctgtcctgacagactgtgcccagagttcccccagcagcctctagctgtaggctcgctacttgctgtctgtttctgaagaatcctggatcctgactctgatagcagagcctatgtacagcatgaagagggcttgttaatttttatttctgcacatggacactgggggtcagtatttattcacaaatgcatctatatttgcctctaaccctaccttgagcaatctgctataactggtcatgtgctacagggaggcctggaattcctctgtgtgatttcttcctgtggtcctgtagctggagagctctgcctacataaccataaacataaatagaagcactggatccccaagggacttcaccctgggaaagaggcaggtttaaatctaatatataaactaatatcaagtccttcctggtttctggagacttatctggtatcattgaccatatcagggtgttcacccagcctcctggccaccacccctgtcttctcttgattaattgtggtgtcatctctactcacaattttattccttctccatatctattgctgctcttaaagccctcatctcccccagaggtacttcagcttctctcgcctcaacttcttttactcttctccagacaggtgtcagggtgacatttcccaagtcttgctccacagaggctcatgcagactcccagaagggttagtatccttccaggctctcctctccatcactcacctctccctgtctcagttgctgcctcctgtctgctcatccttcaggactgattaggcaaaaaaccaaacaattttccatttgtaatgaagataaacagaccaaatgatgtgggtgagaaacttttgtgaatgcaaaatattgatgcatagtaattattttaaatgttgctaggaatcttgcgctatacaagaaagcattattcctttaaaactctaaaaagttaggcagccccgtggttcgctctcagaagctcacttgtttgcttgcttgtctctttggctggctggcaagggaagtgaatgaatccatgtctggattcaaaagtttcgagagtgtgtacacacacacacacacacacacacacacacacagagagagagagagaaagagagagagagagagagagagagagagagagagagagagagacgcccttagaattcccaggattaaaaaaaaaaaaaaaaaaaaagccggcgtggtggcacacgcctttaatcccagcacttgggaggcagaggcaagcagatttctgagttcgaggtctacaaagtgagttccaggacagccaaggctacacagagaaaccctgtctcgaaaaaacaaaaaacaaaaacaaacccaaaaaacaaagaattcccagggttcattcccctccagtgtgggttggtttttaaggtttttcttacaaccagcccttgatctttaacctgtctagactttagttgcttatcatctatgcagaaatgatccccttgctgctggtacataagagagcaaaggaggcctcatgtgtaatcagctcagaggatttcccctcaggcagctgctataatgccataaaaccagagacctgccatgatgtcattcaaattacagagtatataacaatagaagtatcttgtgagcagaaggaattctcaagttttgccctagtaagcaccatttcatttatttctatatacatgtttcacatggatacattcttaactcatattccatactgtgttcttttatttatccaaagtatttctccatgcttcagagttttagccaagcgaactgtacatctgaatgctgttctattgtttggatagaacgtaaaatgtcccggaggctgtacttgaagttttttctataataaataacaacagcatttgggaggcagagataggtggatctctgggagtttgaggccagcctggtctacagagagattccaggacagccagagaaatcctgtctcaaaatgccacaaaacaaaactaaaagatactaaagccaacaagtggtgaaattctctgaagagagttcagaccttctaaaccttatgtgatcttgatgtgtgcttgtacgtacacttggctgaagaaatagtatctaggcagtaactccaagacaaaaagtgcttaagaacaagataagtctgggcattcaatccctaacattgcaaaatcaaaacaaaaccagataatagaatccagagagatggtcctgggggtaaaagcccctggcttgcaagccccatgacctgggttcaatgcttggactctacacaaagaagggaggagaaaatctgttttccaaaggtcttctctgatctccacagtgtgtgtatatgcattcacacatccacacacacacagtcatgaacacacataaaataataaagtttattttaaattttcaaaggagataattgttaaaatcaagactgtttggccaggtgtggtggcacacacctttactctcagcactcagtatagggagaggcaggtagatatctccgagttcgaggtcagcttggtctacttagtgagttctaggacagccagaactatgtagagaccttgctttaaagaaatcagggtagtttgggcacggtaatgagtctgaccggcatgagatgggatggattggagaaatccaaagcaaactgagcacggaagacaggccaggttttctcagtagaggagaggccaggtagcccaaaccctttcgctaacagggagagtcatcatctgagaatacagaacttccctcaacgtactattgcatccctctctcatgatacaatttctatgagaactggaagtcctaccgtatttaaaaggagattaagagagaacctttgactctcccctgcttctagctgctgcactgctcctgaatagcatctcagtgcgaggaaatggcagtaactgttcgcatgaccgttgaaatcagagccaagtattatacttaaaatcttgattttaggagctggttagatagcctggtggctaagaacacttagagattctttttaaaataattaat

SEQ ID NO: 384 - DNA, 825 bp, Mus musculus
agggtagttcagccaccagcatgtccaagcacaaacttattatactaagacatggagagggccaatggaataaggagaaccgattctgtagttgggtggaccagaaacttaacaacgacggactggaggaggctcggaactgtgggaggcagctcaaagctctcaacttcgagtttgatcttgtcttcacatccatccttaacaggtccattcacacagcctggctgatcctggaagagctggggcaggagtgggtgcctgtggagagctcctggcgtctgaatgagcgtcactatggagccttgattggcctcaacagggagaaaatggctttgaatcatggtgaagagcaggtaaggctctggaggagaagctacaacgtgaccccacctcctatagaggagtctcatccctacttccacgagatctacagtgaccggaggtacaaagtgtgcgatgtgcccttggatcaactgccacgttcagaaagcttgaaggatgttctggagagacttcttccctactggaaggaaaggattgctccggaaatcttaaagggcaaaagcattctgatatctgctcacgggaatagcagtagagctctcctgaaacatctggaaggtatctcagacgaggatattatcaacatcactctgcccactggagttccgattctgctggagttggatgagaacctgcgtgccgttgggcctcaccagttcctgggcaaccaggaggccatccaggcagccattaagaaagtggatgatcaagggaaagtgaaacaaggcaaacaataaagtgtggccaggaacgagtttgggg

SEQ ID NO: 385 - protein, 261 aa, Mus musculus
GSSATSMSKHKLIILRHGEGQWNKENRFCSWVDQKLNNDGLEEARNCGRQLKALNFEFDLVFTSILNRSIHTAWLIELGQEWVPVESSWRLNERHYGALIQREKMALNHGEEQVRLWRRSYNVTPPPIEESHPYFHEIYSDRRYKVCDVPLDQLPRSESLKDVLERLLPYWKERIAPEILKGKSILISAHGNSSRALLKHLEGISDEDIINITLPTGVPILLELDENLRAVGPHQFLGNQEAIQAAIKKVDDQGKVKQGKQ

SEQ ID NO: 386 - DNA, 52987 bp, Homo sapiens
acagtgattggaatagtgagtttatatttggtggtgcatgaaaaaacaaggagatacatcataaaaaccttggaaacaatagaatcattatcttttatagcttataaaatggtgggctgagcttctgagtctacaaaattgagtgggaaaccttacacatagtgagtttaccaaagctagtgtcacctcaatggttttccaggcctcattgcccacattttgttttaaacttctttgggtcctaggaaggtgcccccttggacaacaattaagaaaagcccagaccacatttctatcattcaggccttctttcacttccttttcaaggctacattcatttctcttacctgtgtctgtagcgatagatggtattttcttttcttttttttttttagatggagtctcgctctgtggcccaggcagaagtgcagtggcatgatctcagctcactgcaacctccacctcccaggttcaagctattctcctgcctcagcctcctgaataattcggattataggtgaatgccaccatgcccggctaatttttttttcttttctttttttttttttttttttttttttgtatttttgatagaggcagggtttcaccatgttggccaggctggtcttaaactcctgaccttgcgatcaatccacctcagcctcccaaagtgctgggattacaggaatgagccaccacacccagctgatagatggtattttctaagcaacaaatgagggtatttgagccgaaaaaaacgtgcctctcttccaagaaagaatggatagacaatttcaaaaattagccagtattgggaaatcagcagagtagttactgtgctccaatcccacctctttctgtaaatgacacatggagggtataacacaaggatttagtctgggggtggggccaggcaaggaagtctatactgctagttgggaggaatcttcacattgactaattctccatggtcacagagttcctttcataccgctccctctaatttccattatcagagtctttaaacctatgtcaatgtatttcttttaaaatgtgatccaagaaagggccactttagaagaatgagctcaaagactgtgctttccctgctcctctgaccccaccaggtttccagcacttcatctccagtatcttcagtctctccactgtttcttccaggccagtttccagtggaaagactgcatctaatgtccttgagttcttcttctgttgctggttgagatatgccgttgccccaggcagcaatggcagcagttcaggattcccaacctctttcaaaacaggaagccccaccccttaagcaaccaccttctagtgtagtacatgctagaccgtgctacctgggaggagtggaaatagcatcctctacagcggcctttgctctcagagcacatcagggctttggctctgtgtttctattctgtctttggtccacggaaatgtttatactgttttcgaaccctagaatatattttgggcattttctttttatgttatttaatactgctggatgtttacagtggaaacctactatgcaattctgactggaaattctgtgcatatttaaacattgctcagaattcacctcttccatcaaatatctaaacttattacaaccctgcacttacgctctccctttccaccccaaaatactctgtgagcccttactcattctacttgcacttgtatttgttggactgtaataaacacttgagttagtctttcccctactggaccttgaggacaaggaggatgtttaatttatttatatatctcttgtacttggcacagtgacttgtttatagtaggcacgaaaaatactaattcatttccttcaaaattcctaacacaagttcttgaacattaggaggaattcaatgaataattggttacttattgatttgctagttgagaccagaacctgtacacttctgaagactttacttattcttcttctttatcctttttttttctcctttttctcccatttttagagagggcagagatgcagcaaagcataaggaaatagatgagtttaggagaagagaatatgctatagttaccttttttcagaagaaaagaaatgaaagcattttccataatattttgttagaggttggtctattcttgttttactgaatatagctgggtttggagctgagaacacaggtcctttcctgctgtgcataaaaacaattatctacagaagggaaactctagcaatatatcaatgccaggcctttatacacttgttggtattctgatggtgaagacatgtatgtcatttggcactgcagttccttctttgtttcggctgtgatagtgatccaggatcctagcaatctaaacatcatcttacttcgaattaccaagctttgaagcctttgccattactcactttataagtcgtaacttagtaaagagaacatcatatgagagtgatttttcttccctatctgatttttacatcttctggttgcaaacagcaatttacctattcctcttatctgatacctcacagagtgacaacatcagaaactagttaggacactcacctggcagagactggaatttagtggttggtactgactgatgatataaacaattaattatttactctcttcattccttatttcaaaagttactaataaatgaagccagtcaagctatttcttacattttattatttttaaattttatatttttattttaattttatatttttaaattttattataaaaataaattttattaaatttattttataaggattttattttataaggattctgtgagtacttaaatgagaaacataaagaactttgtctcactcatgttggaatcatagctctttaggaaaaaagtagcatctctctagacataaaataacaactataagttgctatagaaacaacagctctcaaagccagtagagaacatttttaaaaagggtgccccttagaatctcaggtagcctccaaaatgcttacacccaaagaaaaagtattttacatagacgggcttagtttagaggtttaagatgatttcatctttaaatagatagcctttactctccgttgtgatttttatactgttttagatttcttaaaaagttttcccctctctatttttcagacccattaggcttcatgtcatctcagctgactagcatctgtggcctggcacttgttttgactaagtaatcatatgcctttctctacctagtgcagcccctggaaccttatctgctaggaccagcctttcactgccctaggaaggcctcccagttgcgtgttacatctgtttttctctggaagaaaacaagagaaaacaattaagaaggttgattttaccctatacataagaaacttcaattctcattctgtgctttaactgcttttgtatttaagcaattctttcgtctactttgagcctctattttctcaactataaaataagggagttgagctacatgatttctgtttctttcagagctaacattttcagtccacacataaaatttaacattattcttataagtttatatatatcacattttattgtaaactcctagggtctaaaggcataaatgtttttaaaaagacatgtacttatttatttgtgtgaatctatacacaaaaagtactatttagcaaaaaaaaaaaagacaggaaatttaatctatttcttttttgatgcattcatttattaacatatattaattgagcacctaatgccagacattgtggacaagtggtaaaccaaagcaacagggcccatatgtttagggagcttgaagaccaatggagaaacagatcatatacagtgtaagtagatttgtgtaaagttctataaagaagaagtgcacggtgcctaggagatataagccaggtaggatcaagtttttccaggaggatgaccactcaataaatatcaaagttgaataggaatcattagactaaggggcagggagtggggaagggaggaagaagagaaggaggggaaggatgtagcattctaggtagggaatacacatgtgtgaaggccaaatgatcatagggagaaggaagggtcactataaggagcaatgggaagccactgttctaagctggggagtggtagggggtgacttgtgacacaatcactaaggtattctaccatatcacccacccctggctgcctagaagagagtaaaagtggattcagaaagacttgttaggaggctactgagaaaatgccggcaagaggtgatggtagcttgggctaaggtgttggtagtgtgttaggggtgtggtgtgtctgtgaataggatgaggaggatggaaaaaaatatttgaaacataaaccttgattgatactgatttggattagattgtgtaaagaggctttaatgagacattctagaaattacacttccacgtaagtgtcactgccttctaagtgttatattatgaggttacacacccatttcaaagatgcttcatgggtgtcaacaattctgagaagcttctttcagaacttacgtcagaaccagtgtataaaccatagcagaaaaataggcttattgctatatagaaaatatttcataaatccccaaagctaaggaaacaaatatgtgtgtaatgttcttaagttgatgcagggttcataaagacttccttttatgagtttgaccttccaacttgtagagtgaggtcacttctttaagaaaatatgcatgtatgtaggggaaaagttatgttatctgagtcttcatcaaagaatgaggatatgttcttttatccaagagctagctgactggggaagcccataggcagaagaaaatcctggtcaggaggggttttttaattttatttttagggagcagataaatacatcttagatgactgacaacaaattttccaaagaaaagaagaatgaagttatatcaataagtttttaggagcagtgcatggtgggaagagcttagaacaaaggctaagagtcagactctggttttgtaactagctgtgcagtcttagaaaaattatctctcccagttttactttcctcatctgtaaatggggacacatatgccaggagttttgtgaggatttactgatggagccctgatagtttggctgtgtccccacccaaatctcatcttgaattgtatcccccataattcccactgttgtaggagggacctggtgggagataattgaattatggcagcggttttccccatactgttctcatgatagtgaataagtctcacgagatctaatggttttataaggagaaacctctttcgtttggttctcattctctctttgcctgccgccatccatgtaagacatgacttgctcctccttgccttccatcatgtttgtgaggcttccccagccacatggaactgaaacttcaattaaacctctttcttttgtaaattgcccagtcttgggtatgtctttatcagcagtgtgaaaatggactaatacaaactctgatttccatccaccatcccctccatatcacctccccaccctggctcctcagctaaacaccttttcttcaggttaaagaatagaaaactctgtggagacagagggtaagcagaaatccttcagtagctatcaggctactatcttcacctttcttagctctgtaatatcagaacatagagaaaaaaattcctggccactttatcagtctccatgaagaaagggtggagccagtaggcattgccattggttcagtagacattcccggagcaccgtcatttagagaaagcagcagcccatttaaatcaatgaatctttttaggaaactgaaacaagttcaatgcccaagagtagagaattggttggacagttctctactcttgtacataccacctggatgcacattcacgtaatgggattatatacggaagaaaaatattaaatgacattgggacatgttaataacaaattaagtagaaaagattgccacaaaacagtatatatactaagagtccaggttttttttttaagtaattgatttatgggaaaaataggatatacaaaatgttaaaaataaattctggagggtgggattataggtattttaagttttttcttttctaaaccttatacaataaacattttaaaacataaatttataattaataaatataagctttaaaaaaaactccatagggcagagtttgtgtttaccagcatataaacaacaagcatttaaagaaacatgggtttttccttagtggagtagagaatttgtaaaagaggaaagcacctctcttgattcctcatgtttctacctttttcccctatccttgtcccagatctgaaagtagtggggaaaaaaaatcaacctggctcttttcctatgccaaggtgcttagtcaatgtttagttttactgtaggggaatttcacatagatcaggcttcccaataccagaggttcctggctctgccactgggtctgtaccctctttggcattcacttcctgcccattacctccctgggtagctgcaagatagctggggaaatcccagtctcatgccctctgcaagagtccaggtctccacttgagtggagagcaggaaaaagaggcaagcgcaatgccaagactttactgagtaatttgaataagaatacttgtaaataggtaaaatgctttacatttatcattaccataattgttaagaataacaactaccatttatgagatgctttccatgtggcaggcacacatcacattatcccacttaattttcacattagcgatttgggtattatctctgtttaacagataaagacactgaggctgaggtcaagcaatttgcctaggctattctgcattttgctagcctagcaaaaccattggctccttccttccagcaaactctagagttagctatgattgtgaggcttccccagccacatggaactgtaagtccaattaagcccctgagttcccagtgctggaaagtgacagacacaaggtgcttcaaagattgcaaagctattccaaaactgcctccatgattcttcaccctactctgtgaggaagatgaggattctaagttttaacttctgaaagaaagggacagactttaaggtcccttctgagaggtctggatggctgacccataacagcatttccagtttttagtttcagaaaagggagtcttgtacttaggaggtcaatgatgggggccacgcataggtctattatactaggttacgagtggtaaattttaatctgaccctgaagtaagtagggtacagttggagactaaacactggcagcaaataaccaactcatggtgtgtcctgatactgtgaagaaaaggagacactcctgtacatggcatatagaactagctaactctggagtttgctggaaggagggagccaatggttctgctaggctagcaaaagggagaatagcctaggtccgtggatgatgttttgatgcacggtggaccaattcagccatacgtggaaaaggctagaggctctgtgcacataactgtgaaattattttgaccaggtatgtatgctatcaataaaatagtggtttattcaggtcacaaggaagacaattttcaactaaaactcaaagtatcacatgggttaatactgactttttgatatacacctgtaacagaaaggaagacaaagagacaacatagctataataatttattgcttttcatttcttgtttggataaaagtgagactacatcaaaagctgtttgatgacactgaattattttcatagtatctatatcacttgctgtatcagaactgaagtcctcatgactggtcttcaatggaagtgaatcctaaaattaatcttaatttaaaaaatacattgcttttggggtgaggaggagaaggcagcaggaagaggaagcatcttcccagaattatatgaattagcaaccttgggtcctagcccaggatttgtccccaaccaagtaattctgagcacatcacttaagcttcagtttctttatctgtacaacaaggagctagagtttaatttccaaagccctgtcaagtactaagtttgtacaagtctaatattctttggagttcatctttgccttaaatggatttatgatcatctttgtgaaccacgacctcgttatttaaaaattcataagagagacagctcatcgaatagaccaggacacagggttcaggatatgatactgtaacataattaagtatggagaacaatcttgccatagggcaaaagtaactcctgaaattctgttagcctctgtgcacatttgtcttacaaacatgcttgctcctgatgaaaatctgctttttaattccttctagacagaatcactgatataagcttccatcttatatcaaaatgactcattcataagccacatactcttgcgaatgattctaaaaggcaagtgatgtttgatattaaggttttatgtgacaagctagcattccatgggtgtccataacaacagtaaacttaaatccaatgagtaggcgcccttaagtccagactaagtagccctaaatgccaaatgccacaagactgtcacttggtaatgactgtcattagcctccggagtatggatggtgggcactctgaataggagctttattacactgtagaagaaaagctttctccttactttgtcctcaactgatattgagaaaaaagcaagagggcaaatgtataagatttggaagctgccccttccagctgttctggcctgaactctagttaatcttgtgcaagttaaattctaactatcactaggtgagacctatcacctgctgggacctgtcaagcctcggattagtgccgtcccggaagtaaagttctgttgatatcccaggaggaactgtcatgctctaacatggataaatgagatacagaactggctacgattaggtcttaatgagttcaataaagagtgtgtcacagaatttcaaatgtggaaagattatcttttcaactgtatgtataatttattctgaggacttgcttgcgtgtcacaaacctaatgcatttgttaggaggatgaaacaggaaaaactcacaggaggacacgaaacactacttaggatagcttctaagaagggaatctcccataacattccttatctttcccgcccacccaagagttctgacacatatgcttcaaaacctcgtgtggtagttcaagcctgcttagaagcttttaaggcctcgtgccaggtttccggtgttttcatagatttctcttgttcagttattgtcgcctccaaatttgtcattctctcattccactctagcctcccttcctctgtgcaataagcttttagggcattccattaatcacttttcttccccacctaaaatactgtcagcaaactgcctaggggaatccctataaaagcggtaagagaaagtaaggttgcgttactgcctataaattgggcactttaaaggcatttgttttaatcacgacttaagactttcaaccacgagtaatttgtgcgaaaggagcttcttctgggaggatacctcggcttcgtcttcaggtttcaatccctaaatttcccataagtaaaagaaacatcacctcctctcttccaagagtccgctgacacctgtcttcacccgcaggtgtttcttttaagacgttaaacgctttctagaacctcaaacagctaagatgctccccgcacccgaggttttgcaccagcgacgctctagggtgtgtttttctacttccctaggcccaagcctgcccgctggcgtcgaagccaactccttactggttcaggtatgtgctcgtctctagagtaaaccaatcagagccccacttcttactcctgggatttggtaaacggaagagacctctcctgttccgggagtaggccgggaccgtggatgagtgacagttcgactttccaataggcagagccctaggacctgcccacgtctggttcaggggctagaaaagagcgtcgatgccggcggcagtgatgagtcctaggaggcgctggctctttggcggctcggaggagcggctgctgctgctgctgctgctgctggtggcccctttgcaggtgagtggctttgttttagaaaatgttgcgaacgtttacattttttagtgatgtgatgttttatttttgggtgcggggaaggccagtttctttacttcccccggtttagtcgttggtgggagtctggtgcccactccagccctcaagctgggaccctcacttatcgccccggtccctttcccttgtccctatctcagaatgagcctcgcaggcagtcaccgttctgtcaactgagaggaggagcccgctttggtagtgctgtccttatggcaagaatatatagaagttggagggaagataaactctcttctggatgtctgaggtactgtgtagcagagcccttccaatagtaagatcccctggaaggaagcagggcgatgccgctgtatttagggttctggcagacctggccctatctatcattttgtgtagtagacagaaaaactcgaatgcggtgaaaagagaaggaggtgaatatatgcagtgttttcatgtaggaatctggagccaaatcacaagttcttagaaccactagaaataaaaacgtaagtgtattttcctcttttctaagggacgagctggtattacactagagaaggtcaatgaaatgcataattgcagttaagttcacagttaagctttaaagaatagttggttgttagctaacttataactctcatccccctactgcctcccttgcaaattacggaagatctttagcttgtgagtggtactagaatgttagctgactaaatgcagactctttccaagaaggggaaaaatcaaaagctaagtttcacctgtaggtactaaaggttttttaatagtgaaagcagaactcatgtcaatttgtcttttattttttattttttttgaaacggagtctcgctctgtcgcccaggctggagcgactgcagtggctcgatctcggttcactgcaacctccgcctaccgggttcaagtgattctcctgcctcagcctcccaagtagctgggattacaagcataggccaccacgcctggctgatttttgtatttttagtagagacggggtttcaccatgttggccagggtggtcttgaactcctgacctcaggtgatctgcctgcctcggcctcccaaagtgctgggattacaggcgtgagccaccgtgcctggccttgtcttttttctttctttctttcttttgttttggttttttttttgttttgttttcagacggagtttcgcttctgttgcccaggctggagtgcaatggcgcgatattggctcaccgcaacctccgcctcctggattcaatcgattctcctgcctcagcctcccgagtagctgggattacaggcatgcgcccccacgcccagctaattttgtgtttttagtagagacaggatttcaccatgttggccaggctggtctcgaattcctgacctcaggtgatctgcctgcctcggcctcccaaagtgctgggattacaggtgtgagctaccgcgcccggccttctttttttttgaactgcctcccgtgagtccagggaatagctctttcttagccatctttgtattccagtagcacctcatacaccgcagatgctccccagttggtggtggacttcagagaagcataattcaaacagtgtcatagtggaaggagctctgagttagaaatcaagaacattggctttagtcctgaaactgttactatttgtgtgatcttaaacaaatcatttcaactgtgactcttaatttttgcattttttttttgagacagggtctcgctctgttgcccaggctggagggcagtggcgcaatctctgctcactgcaacctccacctctgcctcctgggctcaagcgatcctaccatctcgatttttgcatctttagaaagcagatgttgcattaaattatatctgagatataaactctgtatttaaagtctgttttaaagtaaaaattattagtatacaagcagaatctcattgcagtaaattctgtaccatctattagcaagtaaaagttcccagcttcaaggatatattcttgttttttaatttttaatttttgtgggtacctagtaggtgtatatatttatgggttacatgagatattttgacataggcatgcaatgcataatcacatcagagtacatagggtagctgtcaccaaaagcatttatcctttatgtttcaaacaatccaattgtactcttttagttatttgaaaatttacaattaaattgtttttttttttactatagtcaccctgttgtgctagcaaatactaggtcttattgatcttcctatttttgtccccattacaaggatatactcttttgtgttcctatttaaaccaaaccagattattgtagaaaatttggagcataccgaagtataatgtggcagaaaaatgtcacttagaagcaactactgttagtgtttgggtagagcttttagtctttcttcctcttttgcctgctgtggttggttgagattaagaggcacattttaagtaatgattgatgcacctaaattcacctggccttcatctttgtgtgtctggggcctgaagaacagaggtcacaaacgtgtttgaaccgaatggtttcttgaaacatccttggaatgaaatctgatatgaaagatgtttatatgggtggcaggacaaaaagtattacttaataacaaaacccttctgctgaaacttagccacaaatatgaggaaaacatactttgtaaaatataaattaaatgttaaccacttcattaaagcatttggattgcagaatattagtacttggtaagcttctgagactgtatcttaccatcaccttcttccatcccacaatatttgattgcattcctccttctaccacctaatttaagcatttctcctctaattcctcccttcattttactttattcccagctttcgcttctgctcatatcatcggcaaggtaggattgctttgacgggcctgagatctgtgccattatttatgagttagtcaaagtctgctccattctacctctcactttttggtagagtgcttcaccataatctcatttaatctttctgatagccccctgagaacagtagtttcatgatcctcatctttatagatatggaacctgaggttcaaagaatttaaataagttaagatcacattgtcagtcagtagcagagctgggctcatatctaggttgtttttactttagacttttggaatttggtggacacagtttgtgttgataaaagctactaccctggggaagacaatgaccagagataggaaggaggggtccgtcatgagtgggtgttgtccacagtggtgatgccatgcaggctggaacatgcaacatgccctgagcaaatgcacatctcattacatatgtatatctcttcgccatgagtagggatctgcctggtatggttggttattcttgtaacaagcaatcagtaggaaatattagtagatgtaagattggggaatgagagggttttagtgtctggaaaacacctgtaagtggtaacatttgctcctgtaaaatgatgttcttataactgcaagtacagatgaaaaagtttctacaaagccttaggaaaagtaatagaccatggaacacttttaggtacagttgtgtttgaacttctaatagtgaacttgatttgggggaaggcatagtttgttaagacattaaaagccttggccgagcacggtggctcacgcctgtaatcccagcactttgggaggccgaggcgggcagatcacgaggtcaggagatcaagaccatcctggctaacatggtgaaaccctgtctctactaaagataacaaaaaaaattagccgggcgtggtgacggtcacctgtggtccccgctactcaggaggctgaagcaggacaatggcacgaacctgggaggcggagcttgcagcgagccgagatcacgccactgcactccagcctgggcgacagagtgagactgcgtctcaaaagaaacattaaaagccttaaggaactgagccccagatttcatttcccttgagacctgttcctttttactttgttaaagacatggttctttttctctgtcctcaaataatagccagcccatcttctataaagttagattcctcttgcagtgggggttaaaagttgctcaaagccacacaataaggggtttggaccaaggaaaacgtcatctgagtgtctagggtagcaactgactaatatttaaatgtgagctttgaatctaagtgactctggttctatttgtcttattttatataacttcaacattatattgctgatcaaatttcttgcttaaacgttggaaatacaagaaaaactaggtttttaagttggactttaccctgtagtttgtcctatttgtccgtgagttgtaccactagggtcttaggcattattaactttcaaacacgtgaggaagggaggaagcaaagtcccaggagtgtcagtttggaagacaggatgagcctcagttatggggagtacttataacagaggagcctcagttatgggagaaatataatgtgaaattatatttcacataatttcatatgtggaattatatagtttaatgaaggagtaggaagcagcagcagatgatcatgctacatttgttgaaagtacttagggatctcaaaaatattaagaggggtaaccttagtaaatgcagtgccttgcaagtacatcactcccctatctacagtccctgtcttgccaaaaagaatgctaatcttgaatcataattttatgtttcaattttatggtggcattatggaaagaatattctttgctttatagctaacttagatggaatttctatacatttatagtgaaagatctttgaaagttataagtcacctgcaaagtatgttctttgatttgtttattgtcaaagcaattacatagcacctactcctgagcaagtatacattcccctgaagtgtgaggcactatgggataatttatgaagatgtctaatggggtaaagtgtgtcaaaatgacagatgatatttttgaaggagattaacaggatgaatcctatagttttcccctatagttcaatcttgaacctattcctaaataatttagttaagcaaaagtcaagtactcagactgatttaaatgtcttcagtattgccttctgtgaggaataaaaacaattatgaatgggattccattactcatggtacttgccgttctggccaagaataaaatctagtgatttcataatgttgggattattctatgacgggatgcttaaaggttaaaaatgctgatgtcattagtagatctaagtgtgggatccagctaggccaatatcggcatattgagggcttctggcctataccgttttttaaaaaatttacatttttaattttaaattatggatgcataatagttgtatatatttataggtatatgtgatgttttggtacagatatacaatatgtaatgatcaaatcagagtaattgatttacctcatgcatttgtctattacctcatgcatttattttttgtgtgttgggaacattctaattccattattttagttattttaaaatgcaataaattattatcaccctattgtgctactgaatactgatcttatttattctaactatagttttgtacctgttaaccatcctcactttaaccccctcgctcctgttacctttccctgcctctggcaaccataattctgctattgcaatacattcaattttcaaaatttttagctcccacatatgagtgaaaacatgtgaaatttgtctttccatgcctgacttatttcacctaaccttaggctctccagttccatccatgttgttgtgaatgacagggtttcgttctttttatggttgaatgatattccattgtatatatgtgccaaattttctttatctgttcatctgttgatgggcacttagattgcttccatatcttggctattgtgaatagtgctgcaacaaacatggagtgcagatatctcttcagtatacttatttgctttcttttggatgtatacccagtggcgggcttgctggatcatatgtctactacctgtttttgaacagcccacaaactatgcatgggttttacatgtaaaacggttgaaataaattaatatttcatgtgcatgaaaattatatgaaattctaatttcagtgtccatacctgaagttttattgaaacagatttattcacttatatattatgtatggtggctttcagctgcaatggcagaattatacaattgtacctaattatggcagagaccagtatagcctagaaagcctaaaaaatttgctatttggtggtttacagaaaaagttgctaacatctgagctaagctatagtgtctttcacgtttatctccttcatctcacttaaacggccattgtcctggtccaagtctttattctgtgttaccagaattattgcaaaaacctctcagctagtgttcatactcctgggttttcctgtctatttctgtaagtaagtgctgcctgatcctgctaaaatgcatgctactaaacttttaatgatgtcccaatatgtatagaaaaacctacatgctttggcacaggctttttttgtgtcactattttttcttatctttctaggctagtcttctcctgcttccttattataccctatacttacagtggccatataattttccaaatgggacacttaagtgtgaaaggggccctagtagtaattatgttggggaaacaggcctaagacaatactgttctgtaataatgatgcatgtgcctctttctcctaactaccctctctgtcttgaccttgccaaaagaatgctaatcttgaaccataacttcaattttatggtggcatttatggaaagaatattttttgcctattaggcaaatcaggatgtatggttactctagctatactccaaccagtttgaatgggctcgccattttccatatgtacctgttcctttgccttcactcactgttcccctagattggaattcctttacttttttctgtaaatctaaaccttgcctttccaaatccagcttaaaaaatactgtgtccacgaagccttactcagaaatattctctcccatcccacctctcttttactaatgaagtgctttctcatggtgtgaattactttgagttttaggtacacacacacacacacacgtactgaagatgaagacataattcttgttggattacatattcctcataggcctagcattgggccatgcctaaatgggatctgcaaaatgtttgaagaatgaattaattggtcaggctagggcgactgagtatttggggctttcaatttatgagtcatccattttaatgtgattaaagcagtgagaaaagggtttccaagaactgaagactgagcctcaggtttcaatgtgacagtgtagcaaaatggttcagggcatagatacagacttctcgagactaaattccagctctgccatttacagcctctgttaccttaggcaagttaacctttcctcctgtttcttcatctgtgaaatgggagtaatcatagtagccactccatggaatggtggttgaggattcaaacagtgccaagtaacattgaactaacattcacaggtgagcactctgtgaatgttggctactgtgactaatatgatcatcttcatagtactcttacaggtaggtaagaaaatgcagacacccaagaccaagatgtaaccgtggaagagctggaggaaatgctacaccaaaatcttagtgggttttttttcttgatggaagtagtctgttttagagaagtcatgagagaagatgatctccacttagtaagaagtaactaacctgtagtcttttgaggcaccatttcagtagagtgggtaaggcacaagtttggtgtcaggaaactaaaaaaggaatggctagaagggaaggtaaatggacaagaggaaggggagggaggataagatacacagctgtgtaaaagatgtttccttagtaaactttttcttcaagccagatcacactttaaaaaggaagacaccctgggggataaatcaataacctatgtgttctttttttgacatgatgtaaattattgattaaaatcggtacttaagtgccagtaacttttgctatgggataaatgagaaaccaggtacaggttggtgagcttttatgaaaaacaaaacaaaacaaaaaaaataaagcttgaggttgaaaaggaatagtttttaatttgggatggggagtatttattcttagtaaggttcctctttataagttggggtgactattgcctggcttactttgtgccttgaggtttttctcaagagtactaataaggtgagccctccttcatgttcaccttgttcgtttgcgtttgatgaaatggctgcctgggtttggaaggacaagttggaactggagatacccctgtgaagtgaagccaagtgagccaagatcctcaaaccatgactctaatatctccagtggggggttgaaggcagaagaccagggttgcagttccagtttgccatttactggccatatgtttttgaacaagtcaatcagaatctccatttttttctgtggagattatggccatccatgaacatactaaacttatagtacaaaagtacaaagtacagaactataatggataattattcttggctcctgttttgacataaataccctgagattcttaagttaaagtttcctaacatcttagccctgccaactgattttactgtggcagttaccactaaaactctcaagccttagtctcatgtgtacaatccagtcatttctgtctgactttggttcagtcagtacacctactgagtgcctcatatgtgccaagcgatgtgctaggttctagagatacagcagtaagacctgccttgatgcagcttacagtcttacagggcacatagccattgaacaggtaatatatctcaagggatccatcgcaagtgcaccaaatgtggttaagcgggatgctacaggagtaggtcagcaggcctgacctacttcccaatgggtgaagaggaagtctaaagccaggggttctcaaaacatggtccttggaccagccatgtcaccatcacctgaggacttgctagaaatgcatattcacagtcccaccccagacctactaaatcaagctctggaagtgggcccaagcaatctgtttaatttgattttgatatacattaaagtttgagaaccactggcctacaggaactaacatttaagctgagctctaaagctgcatgatctagtgcggtagccactggtcacatgtggctatggagcacttgaaatgtggctggttcacattgagatatgctttcattataaagtacacaccagattccaaagacatactgtgaaaaaaaagaatgtaaattgccttattaataatttttgtatggatcatgtgttagaattgtattagttctcatgctgctaataaagacatatcagagactgggtaattttataaaggaaagaggtttaaatgattcacagttcagcatggctggagaggcctcaggaaacttacaatcatggtggaagggaagcaaacatgtccttcttcacatggtggcagcaaggagaagtataagtgaagtgggggcaaagctccttataaaaccatcagacctcgtgagaactcactttctatcataagaacagcatgagggtaactgtccccatgaatcaattacctcccactgggtccctcccatgacacatggggattatgggaactacaattcaagatgaaatttggtcttggcccctcccaaatctcatgtcctctcatttcaaaacataatcatgccctttccaacagtcgcccaaagtcttagctcatttcagcatcaacccaaaagtccaaatccaaagtctcatctgagacgaggcaagccctctctgcctatgagcctagaaaattgaaagcaagttagttacttcctagatacagtggggctacaggcattgggtaaatatacctgttccaaatgggagaaattggccaaaacaaaggggctacagcaggccccatgcaagtccaaaatccaatagagcagttgttacaccttaaagttccaaaatgatctcctttgactccatgtctgaatgatagcttttggacctataggattcatgtggcttgtagaaaatttaaaacttcattgtgcctcgcattatatcttgattggacacaactgatctaaaggatgactagagcttaacctaaagcagggtgagactgaagtggcaatggagagaagagatgaagggtgagtgttctgcatagggtacagtgtgtgcaaaactactgaggcaagaaagaacctgacatgctcaaggaaataaaacgaaagccttgcaggtcacatgaaggattctgaacattttctaagaccagtaggaagaattgaggttttaaaataagatactcaattttcaaggagtttaattgttagtttgcagttaataaatgagggcaagagaacttcaactgaatatagcaagactttcaacattgaagctccccaactccctaggatggtgggggaggggcgatttggtcagtggaggaagcaggacgctgcccatcacctgaacctaaccctagggtatgaggcatgagcaccccccactagagagagaagcagtgtcacctgggaagaggtcgttttcagttcagatctttttcagtgcaattgacactcaaagctgagtgggagtttgaggacagagctaggaattctgcagggcaccagcaaatggtttggtgagggagggctgtaaaggtgggtcagggagaaggaagcccagagcattatggggattagagggtctgtcctttgaaaggctgtgttgggcaataacaggaaagctggttaagtggtccagacgcttgggttctgaccgtctcctggggtatagtggctgtaccatttatctgtggcctaggggaggtttccctttaagtcagaggtcataagctagcagccacgatctagcctgcagaagaaatgttttgtttcactcacattttacaaatatacattagttgctaatatttaaatcagatatcagataaaaatacacgttttcattttttttttaattggaagatctagaaacctcagttgctcagtatcacagggcaatgggctggagctaagtagtaggtactcctttgattttttacatgaatttttaggaggttttgaaatgattgttttagcttttttaaaaaagacatttatttactcaaagtttctctgtggtctgactctaagtcttgcattcatcctagtcttcgatgtcagcaatcccatcttctttttgttttccagaaaagttctaagaacagtgctgttggctcagtgagatgaggttatcggaaaactttctgtttacacaagagttgcctccttcaaagaagcatgcatggtccttgcaggtcactgtgcccatcactctgcatagtccagctgcactctgcttcacacagctgcctgcccattgcaggcatttgagtttgcaatccatgccttaaactttaaatcacactggctacagcgttgtgtgtttcttggtaaacactgggtaaatcagctcctgtggatgttgactgaagtttctatgtttgcaagctaatcctcagcagtttctttgtaagtatccagcagttaagtgggaaaagtccgttgatagtactagggaggagagaggaaagtgaccttttgttttcttgagatagacatactagtttagtactttatcatgtattcacctgcgtaaatgtattcctgtgcttcagagtgagggaaggatgcatatttgcatagtttttgtgactgcagtactgttcctctgttctggtgtgtgtgtgtgtgtattttttttttagtaaaaagaaaacagaactttgttttaatgcagtaagcaaatataggagaataagataccacaaagcttggtggtgggtgcctgagtgtccatgttgctattactacattgttttgtccccttgatatagtttataatcaaaagatggtggaaaggtgcttctgtctacaaaatttgtctaaccatgcccttctttaactgaagagagaatggcttcattagcttatggaggtttctcacttgacaagataaactgagggtgaaggtagaggaacagttgatagcttcttttttctccatccccctcctccactaccaataacaaaacaaaatgatcaatggttacaaagggtagatacagtttttgatggagctgaggcttctactacttggtggattggggctttgtaaagaaacactgcaaaaatatcttccatttgcaaattaacacacttacacacacccctccgtgtgtgtgtgtgtgtgtgtgtgtgtgtgtgtgtgtgtgttcatcacctggtttctcgcaggtgaggggctctgaagcttgaactttgttagattcatgactattctgcccctgggcacaggcagtcatctggcaaaacactgcctagataccttttgttcccttctctgttctgccaccctgatgcctcttctaggctaaggacagagacattgggcttcctccttgggaattctcagctctgtgggatgctttaatctgggtcctgagcccaggctcttctggttccctggcacttccctgctgcacatgcacagcaacctggtacttaacaagaaaggaaaatcatcatcctaactgctgtagcctttcaacttcagtcatgcaccacctaatgatgtttcagtcaagcatggatcgtgtaaatgatggtggccctgtaagatggtaatggagcatatatagacatctgatatgtggcacttgacattggcattgcagatcgagtaggggaaatgactgatattcagtaattgtgctgggatacttggctttccatatgaaaaaacataagtaacaatatgtataccatctaggtttgtgtaagtacattctatgttgtttgcacgacaaaatcacctaatgatgcatttgccaggacatattcccttcattaagcaacacatgacgatacttgcaaatcacctcaatttgatttctttccttaagtcctctgtttgccttccattgaaatataaagccttattttaaagactgttttcccttcagaatctctaggaattactaaagaaaggtagaaactagatctagattccaatcaattttgccattgattgttattttactgtgggtgactcacagtttaagtgggagagaaaatctccagttaatggaagttgccaagagtggcagaagaccaggctgtagtgctcgtataatctttacaacccagtgtgcaaaacactggaggagagatggagaggccgggcgtgtaaaccaagcatgtgtcagtgcagatgtgtccaccacaaggagagagagaggcgggctgagcagccatgtcagcagattctccgaggatggagtgggcccagcagatcttcaggccagcagcttaaatgtaaggagttcagcatagcttgagagttgctggtctccctttactagattctccccctgctaagacgtagctggtgtgtgtaggatatctggagggctggggaggaggaggtggggcctctttatcagtgtggttcctctcactcctgcctaccagatctgtttgtacaggcagcatccctcagctgcttgcatttgatagcttattttgcatctggatttattcctgctgaaaactctatcttgaggtaggtgcaagattatttaggtacgtaccatatttggtgttaatgtctctttaaagcacttttaatttgtctgaatgttgaactgatgtgttttgcataccttagattttcttgtgtgttgtagcctgtggcattgaagagctagttgccaccagccagtgatacatatcagatatatgcagtggtgcattgaaataacatgtttaataacttctataataagaatgtgagactggtaaatacttctttttccaccacaggaaaacaaagtgaaaaggatgccttcagtgtagagtcagctgctgggagctgggagttcccagccactagtcattctttcagacgtctgtaactcattctattaaatcctttctactgtaagcataaattgcctttgtatctggcagaaacacagcatgccattagaatgaagtgttttgttattttatgtcatgcaattaacatgctatccaaacatcagaaaatttaagtcaactagattccctgtaatgaattattaatatctatagaatatgcctgtatgtgtcacagtgtatgagttatcacatttctgactgttcaaagggatttcagtttcttttagaaattgggtgttgtaaagcgatgtttctattcctagattgtcagttgaatataacttagacttgttgttcttgtctttctagatgtattgctgtccttgaatattagcccatttgaaaacgcctgggaagttcagccatcagtatgtccaagtacaaacttattatgttaagacatggagagggtgcttggaataaggagaaccgtttttgtagctgggtggatcagaaactcaacagcgaaggaatggaggaagctcggaactgtgggaagcaactcaaagcgttaaactttgagtttgatcttgtattcacatctgtccttaatcggtccattcacacagcctggctgatcctggaagagctaggccaggaatgggtgcctgtggaaagctcctggcgtctaaatgagcgtcactatggggccttgatcggtctcaacagggagcagatggctttgaatcatggtgaagaacaagtgaggctctggagaagaagctacaatgtaaccccgcctcccattgaggagtctcatccttactaccaagaaatctacaacgaccggaggtataaagtatgcgatgtgcccttggatcaactgccacggtcggaaagcttaaaggatgttctggagagactccttccctattggaatgaaaggattgctcccgaagtattacgtggcaaaaccattctgatatctgctcatggaaatagcagtagggcactcctaaaacacctggaaggtaccagctttatataccacttattagaggttgccaagtgtgatatctaggccttaatctagaaattaagctaatgaggccctatttacacaatagactcctctatccccctttgtcacttcagatttaagaattgtcttgttctataaatcagatctcttgtgtgttttctgttcctgttacccgaagcagcagttttcagactttagcaagcatcagagtcacctggagaggttggtgtatcacagattgtgggtcccaccctcagagtttcggaatcagtaggtctggggcgcaccctgagaatctgcatttcttagaagttttaggtgatgctgatactgctgattggggttccacactttgagaagcactagtctaaaggactgtatggcttgttgtagtgaaatgaaaggaagctaggaaaggaaggaattgttgaaatggccttgaaagtaaattagagtttttcaagtcaagtaaattatctagacttcagttttgctcacgttcttccaactttaaacaatgattgctgttcctagacgtaggtttcctgagcagttcttttgtttcaaacttcttttcagaacaggcttagtcattgactggaagaaagttagggggaaggaaactaaaaggatagttggtttatttatcttgactctaaaaatttggaaatcagcagcagccataattttaactactttatgtcatgttctacatgtatactaaaacatactgtattgttacctttttaagtaacatgaaccaaatgaactcttgaggattcaggttcaccggttttgagcatcagtgattgcactgtgacaccttctggatttctcactgttctgtggatttctcgtttccctctctgcctccactcatcccagatggttgtgctttttgcgtgatatgccctgtctggtgttttcctgcctttcatcactgtcagcagttagcttactggtaataaatagaagaaatttctccaccattcgttttcattctgctttaattttctataagaggctgtgacaaataaaaaggctgaccttgtatgtgaaataagtagaaatagattattagttaaaaatgaagtaatctttagcatgtgattattttcccctaatttttataacatgaccaagaactaaatcattacttgtatagctgacatccattagtcatgcagagacctaaaatctacagactattagatactaaaattttattggctagacatggcacttgatatgtgtgtgtgtgtgtgtttgtgtgtgtgcacgtgcgcatgtgcgtgggcacatgtgtatcttatttactcaactatataaaaggttctattcttgttcagaataattagatctttaacttcattattagtgatatataacttcatcattaatggaccatagtattttattgtttgaagaagagttgaggcttctactagacaacaacaaactgaaattcagaatttcagagtttctgccagaggtgtattctattcaaccgtgccaactcctttttcagagctgggtctcagatttattgtggccaggctcccttctctcaagaaaacaccactatctcctttaggatcatctttctccaccttcttagcttggaagtcccccttttaaaaaagtttcctactgtttaataccattgactcttcacctatcttcaaatttattatagatctctttaaaacgattctacagcccaaccacagctcattgtacacatcccctcctgctagtgcattgatgatttaactattttttactgttctttttgagggaaatcggaaagtttaacaaatgatggtaaagaagactataaccatggtgggggcaaagagagaattacatgtagaggttgtgtttagacatagcaaaacttacttttctacatttgagggaggctttgaaactattagcaatttatttaattaatttaatcaaatggtgtacctgctttggaaaacaatctggcagttcctcagaagggctaaacatagagttaccatatgatccagcaatcccacgcctacccatatagctatattagcttcccagtgctgccgtaagaaaacaaccaaactgggtgggttaaaacaacagaaatgtgttttctaggggctggaagtcccaaatcaaggtgtgagcagggctgtgctctctctgatgactctaggagacaattcttccttgccttggctagcttcggtgtttgtcggcaatctttgatgttctgtggcttgcagaagcatcactccttggcattctccttgtgtgtgtgtttcttatccacatttccccttttataaggccaccaataatattagcctgccgcctcccaccagtgacctccattttaatgggattattctctgttaaacactgtatttccaaatagggtcacattatgaggagtttgggacttcagcctgtctttttgaggggatcacagttcaaaccatcacaatgcccaagaggaatgaaagcacatgtccacacaacaacttgtacctaaacctgcagagcagcattattcacaatagacaaaagatggaaacaacccaagtgttcatcaacttataaatggggtctatctatacaatggaatattatttggcaatgaaagggaaggtgatgctgatacatgctaccatatgggtgaacattgaaataactctgttatgtgaaagaagccagccacaagggatcacatattagaggatttcatttatatgaaatacccagaataggcaaatctttagaaacagaaggtagagtggttgttgcctagagggtagggaggatggaagattttgcaagtgatttgctgatgggtacagagtttcttgttggggtgataaaaatattctaaaattgattgtagtgagggttgcacaactctgaatatgctaagagccattgagttgtacactttgtgtgggtgaattgtatgtgaattatatctcattaaagctggaaaaataatcaatggaattgaaaggttaaaggatttgtcattggcctagaaaacagtggggggtggcaaacatacggaagtgataacaaaactgaaatgcatggctgtggagtgtagaatactggggaaaatcaaagtgcacatatacaccatggaatactatgcagccataaaaaatgatgagttcatatcctttgtagggacatggatgaaattggaaaccatcattctcagtaaactatcgcaagaacaaaaaaacaaacaccgcatattctcactcataggtgggaattgaacaatgagatcacatggacacaggaaggggaatatcacactctggggactgtggtggggttgggggaggggggagggatagtattgggagatatacctaatgctagatgacacattagtgggtgcagcgcaccagcatggcacatgtatacatatgtaactaacctgcacaatgtgcacatgtaccctaaaacttagagtataataaaaaaaataaaataaaataaaataaaaataaatgaaaaaaaaaaaaaaaaaaaaaaaagtgcagctttgaccactggggcagaagtggacttacagggctcattgggaaataagcaggcattggtcttcaggcagcttccagtccttcatctaaagggctttttattttattttattttttatttttatttttttaagttggaagtatgaaactgaatgaccttttcttttcttttagagattaatgacattttcttttcttttcttttcttttcttttttagacaaagtctcgctgtgttgcccaggctggaatgcagtggttcgatcttggcccactgcaaccttcgcctcctgagttcaagcgattctcatgcctcagccttctgagtagctaggattataggtgtgtaccaccacacctggctaatttttgtaattttttagtagagatggggttttgccacgtttgccaggcaggtctcgaactcctggcctcaagcgatctacccacctcaacctcccaaagtctgggattacggcatgagccactgcgcacctggccattaatgacattttaaagtagccttacattataactcctatccctattaccataaacaggctttatagaaaatgtttttatttgggggataattgatgtaaaacagtggggttggtgtagaaagaagtaaattgtaggaaatgacttcagtaggaagtatgtgaacacagaaaaagacatgggctgccagagagggaggtatctatgagagaggtagagaataaaaatgatggggttgatgaccaaggaggatggcagatagagggaaaaaatggcagaaaagccagaacatgcagttaggataagaccatagcctagaaaactaatggaatggatgtgaggatccggatttgtccacaggaaaatagaaggatggtttgtaatcttgattctcacccattctggatatgatgactttgttcctttttggcctatagtacctcctggtggtactccaattaacactaatggagttcttagatgttgctgtagttctctactgtgacttaactcccacacctaacatggaagaaattatgtcatgtgcatgaaataggctggattggatttcaggatcactgcataagttattgtctctaaatgtcaatctgtgttagtaaagtttctcttacagtgtctattgaaaaataaggtcccaagtattctttttcacaactgcaagaattaagcataagtgactttctcaagatcagaagacatagtatgtcatcatatttttttcacatcatttctgttaatttagtgagattttagccctttcaaaattgattgtagatgtattcactcaccagaataggcatgttaatctaatgttagtcctcttgtattgcatgtctaactttccacagctcaagttacagggtttgtgtgcttcttggtaacttaccaacctaaaagaaagcatttcattggatttagatgctaacttttcaagactcaaaaaattaagtgaatctcccctactgtttaggggggaaataaaggttttcttttataggaaggactgctttgccagttcatgtgtatgtgtttatggtggtacaaaatataagttaccatcttaattgccaatttatgcttactatcaagttacatgatcatacatgcccattttgtggttaatgcctgttgtccgaatgtaattattaatagcatctccttttactttcaaaagtgccccagtctggatgataaattatgtggttacctcactataaaaatattgagctgggtgtggggtcacgcacctgtagtctcaactactagggaagcggaggcaggaggattgcttgtgcctaggcttgagatcagcctggacaacatagtgagaccccattttagaaaaataaaaacgtaaaaatgaagacgttagctttcactactgttaagaattgaatctagaaatgggcataaccagggttttatatttcctgtaagcacaaaagttgctaaatttctttgcatttattataaaagtaaaaacacttgtggctgcagattcatctggttccaagccgtgctttctagagatgtttatgtaaacttctcccatataaaatgggctctttcaagggactggagtaatttttccctattttgtctctaaactgcttgacaagctaaaaaagttttacctactggggcggagtgtggtaacggatagcatcaatgacagcatactgtcctatcagaaaaatactttcttattgtttgaaaactagggtgggaagaatcatgaccccagttaaataactaattagaatattggtctatgctgaaatctcaaattgctttaagatctttctactaagagtatgctagtattactcatctcctcttaggtctagtcttagaggtgtcatccatatacctcaacagtaaagagtgttggttctgaagatgttagttgtttctcagatatttgatattatgacactgtaggcagtcatatcctgactgatgctttctccatttgtggaaaagaagacaggtgctgttggaggaaactgaaatctaaagagactctagattccttggccgtgatcatggtaattagttggcatcaagaactctactcaaaactcagttcactgaggctccacacacagttatcacctgggctttaaaacttttttctaaaaggtagcctttcccttgacctattctttgtttggaatactgtgttttaagaagctgagtcaagaacatccatggcaggtaaactataaaaaggtaatttaatgcaactaattgagtcttaaattattactgctgttataacattgtggtctgaatggcacactctagcatagctatacgggatgacctttattcagtgcatactgcatgccaagcacagttttaggcattttacgtacacatgttgttttatgtaggaactagaacatggctctgaactcactggaaagctatggttcaatactgcgttttactttgctgtttagtatatcctggtcatattttttatttcatttgatcaatcattgatcactaagctgttttgcttaaagaaactgctttagtaaaaagaagcaaactattgatacacccatcatcatggatgaacctcagctgcattttgccaagtgaaagaaattgggctaaaaaagctgtgtattgtatgattccatttatgtgccatttgggaaaatatagaactatcgggaaataacagattggtggggtaagagtaggctgctgggggcacaaggaaattttaaggggttgatagagctgttttatatcctgattggttattacactactgtatgcagttgtcaaaactcatagaactgtatgctaaaaagggtgacttttgctatatgtaaattatacctgaaaaaagacttgctttatccagtgaactcaccattgccttaattgggaccttaccttttgttcacaaaggtaatagactacattagtcaattaggagaattaagtgaagggttgaaggtttgctatatgcacctatctgtgcctttgaaaactaacctggagggcatttgttatgctttctcaaggcttcaggagccatctggttctgactttagcacctaaaccatggtcattatagggaactgccttttaaagtccttcttcatgagaagttatgtttgagaatcttgctaatgttataggttgaaagctcctctaataaaggttttttttatttttttatttttttatcccagactatctctgcttattatcatcaatttctttagccttaattgggccttccatcccctcctttttctcttgtaacaacctagtctaggagcgggtcaacaaggacctcctggagtcagcgcagatgaatggtacactgagaggcaagtgatactgattcggagctagataacactcttgtataagaattgcaaacactgaaaccacatgtcagtgcctaagacaggcttcctggctgatggggatgacctctcccctgtcaaatgacttatttatataatatctctgctcataaatcatatatgcttttgagattgctttacttttaatctgatgatagttaatgctttcggaagaagtcaaaacaagacatacagaatattatatagtaaaaaaatgcctacttaagggactgctttactggcttttagaagtaccattattatgctaataagtccaggttaaaaagcagggcccacctctgactggttcagacacacttctcacaaagcaccaccgtgaaaacatctaacgcagacctaagtatctgaaagcatcctgtactgtagcgttccagacaggcgtgtgtttcattctctgtggttggcatagtcacttcctgtttgtttcctgctggcgcacgtccaaggaaaagccaggtaccaaactgaaacactggatgtagtctgcatcttgccagaggaaatggattgtttagtctgggtttaagcacaggacgaggcagtttcaagtttggagtaagagtgacacacaagacactcatgcaagacagacttgatccctgaagacctgtgtgcagctgcatacatagcaaggcacagaagtgctgagataaaattagagactcagggaggaaaggtcagctgggactagctgtggggacggggactgatgagttggttacctttggcattttagtgtgatattttcagaagcagccaattcaggcctcgcttctgtgaggcaagtagttgcctattggtgtggttaagctttcttttataataattgatttatagaaccctttattttttaaacattataggctattttaactataaaattaaacgtagaatggattcttctctctgccttactctaaattagtggctgttattttatcgtgttattcaaatcaccctagcatatctttacatatatagtattcagatcttaaagaattaaaattaaaaatagatcatttatgaaactctgaatctctagtttcagctcttattggccataaaggaatacagaactcttatcacagattgtcggtggggtttgaattgtgacttacttgaccaggagaggaaagtgaggaatgaatgggtggcaccttattaaatgaatgagttgactggagttgtttcccttttttttctaattccaaagagtatacactaccgaattggggtttcttctttccttctcatcctgtagcgaatctttctgtctctctgaccatctcttctggttttctaaaattcaaagattttgaacactttggagaaaatcaaagaacatctaaagccatttaatttgaattgtttattttattggcactagatgtaaacagctttttgttcaaggctaagattcttttaattctcctttttttttcttggtaaggtcataggagagcacagtgtttaatcaaggcttcaacaataaaagactagatttaatttgaaaacccagagagttcgaatttattcaattcaggtttgcacctagggttcactaaatcaggtcttgttcatggtacaagggatatagcacctatatgtgaatgagacacacaaggtccttttgtggagcttttaacctctttctgaaatttgtctgtactgtacctctgacaaagtccttagggtgttttcatatataggctttatgttttaggatttttaaattaacattttgttcttttttttttttttttgagatggagtctcgctctgttgcccaggctggagtgcagtggtgcaatctgggctcactgcaagctccacctcccaggttcacgccattctcccacctcagcctcccaagtagctgggactacaggtacccgccaccacgcccggctaattttgtttttgtatttttattagagacggggtttcactgtgttagccaggatggcctcgatctcctgacctcgtgattgcctgcctcggcctcccaaagtgctgggattatgggcatgagccaccacacccagcctaacattttattccttatagcctttagttatatgtaaaaagtagattcacataataaatacagctgtaattacttagtggatcatattactgaataatttctggaccctagcagccaaaccataaaagtgttacttacagttgaataaacatttactaaatcttgcagtgggtaaagcactgtgttgtaacagcatgggtgatacagaaatggatcaaacattgttcctgctctcaaggaatttataatcctggtgggaaaagtgagcatttgcacaagcacctctaccaggaggtgctttagtagatgtacagtgtacataacagtttgtctttggttcctgttcctgctatggtgacttaggggagggggttggtaggtgcaaatttgacttcctgaagttattcctctatgcagaaaataaagttgtttgactttctccccaattttggccttgagctacttcctggacttattaccccaaactttcattatttcttccttaaaatatcccattatttaaattgactgcagttagctcctaggtgcttctacatgaagattcgatacttaaaggcagactttaagtatttaacacagacttaaagactttaacacagacttaaagacttcaacacagacttaaaggcaatggtggacccttaaagacaagggtagctgtgaagggaaacaccactgagttctcaccctgcacctgctcctctccaccctactgtagaacacagtgccttgcccattgcaagaatttagtgaatgtttgttcaactgtaagtaacactattatggtttggctgctagggtccagaaattatttagtaatatggtccactaagtaatgacaactgtatttaactccacaccactgtggagaggggtaggtacagggtgagaactcagcagtgtttcccttttcagccaaccctggaacaatatggatttgaactgcataggttcacttatacatggattttttcccaaaacaacttggatcaaaaatactacacttgctagatgtgaaatctgtatatacataaggctgataggactaattcagtttggtttaatatagttcagatgcattattctggccttaggagctctgcctgcttaactttcttaggatgatgaatgtaacttatgccaaaattgagtaatgagtaatggcttcactgtggtttttcctaatttgctgttttaaaattttagttggccgggcgcggtggctcacacctgtaatctcagcactttgggaggccgaggcgggcagatcacgaggtcaggagatagagaccatcctggctaacatggtgaaaccccatctctactaaaaatacaaaaaagtagccgggtgtggtggcgggcacctgtagtcccaactactctggaggctgaggcaggagaatggcgtgaacccaggaggcggagcttgcagtgagctgagatcgcgccactgcactccagcctgggcgacagagcgagactccatctcaaaaagaaaataataataataaaataaaataaaacaaaattttagtcacttaagtctcattgactgattattaaccagtctaagtattttaaatatttgtaagtaattagtctgctgtgtgaatggcttgagtagtcattaaagtggaatgttgattttatttatttattggaaacatttctatttttgttgaactctccttcctttgtagttgaaatattacggcggcctttgtttatttggctctttaatttggtcccacacaaaagggaccaaacttgagagtgctgctattaaacaggggacctgttggatccggttagatctgaggccatggtcaaacaagtgaatcccatgtatacccaagccccttgctgaagacctggaactcgtttctaaagtcacagacaacaacccctaaacatggcccatcataatcgcagtgtgttagctggggatcagacaaacttattcattccctttaccagtcgtgggaacactggatggcatcagcagatgtccatttaggacccagcctttcacgagggcagagcattcatataaacattcttctctctcctcctcagtagtcgtggaaataaccatggataagtcacctgaccagggtttaaatcctggggatttggtagtttaaaaaggtccatttttactgccttaatagtcctgtgagtagagcaggtttttatttaaccactctggatctgtttccttttttttttttttttttttttaaattgagacagagtcttgctgtgtcacccaggctggagtgcaatggcacaatctcggttcactgcaacctccacctcccaggatcaagcaattctcctgcctcagcctcccaagtagctgggattacaggcgtccaccaccacgcctggctaatttttgtatttttagtagagacagggtttcaccatgttgcccaggctggtcttgaactcctgacctcaagtgatccacccacctcagcctcccaaagtgctgagattagaggcatgagccactgcgcccagccctgtttactattttttaacatctttattgcgttataattcacatactatgcaattcgccatttaaagtatacaattaaatggcttttagtgtattcacaaaattgtaaatccattaccacaatcaatgttggaacattttcactaccctaaaaagaaacccagtgccccttagctgttatcacccccccagttcctcccctattccacccagccctgggcaacaactaatctactttgtgtcactatagattcacctgttgtggacatttcatgtaaatggacttatgcagtaagtggtcctttgtgactggcttcttttatttagtagcatcatgctttcaagattcatccaagaaccttgttgtggtttggttcagtacttcattccttttcattgccaaataatattctattgtatggatataccacatttaatttatctgttcattagttaatggacatttgtgttgtgttcactttttgactattatgagtaatgctgctatgaaggtttgtgtacaagttttgtatagactcatatttcacttctcttgggtatatgcttagtagtggaattgctgggtcatatggtagatctgtgtttaacaaaaggaattgccagactgttttcgaaagaggctatagccttttgcatacctgattttacagtgtattatgattccagtttctccacatccttattcacacttgtttataatctgactttttattgttgccatcctagagggtacaaagtagtatctcattgtggttttgatttgcatttccttgatagctagtaatattaagcctatttttatgtacttattgaccttttgtatatctttggagaaatggctgtttaaaccttttgcccatttttaaatttgatcatttgtctttttattattggagacagttcttatatctgataaggaacttgtatctagactatatatgatatacaaatttttctcccattctctgggttgcctttttatgttcttaatagtgtcctttgaagcacaaacatttttaatttttatatacccagtttatttttttcttgtgtatgcttttggtgtcatatctgagaaaccattaattaactcaaggtgatgaagactttactcctatggctttttttctaaaaatttttacaattttagctcttgactctaagtctttgattcattttgagttaatttttatataaagtatgagtcaggggtccaacttcattctttcacatatggatatacagttatcccagtactatttgttgaaaagattattgtttctgcatttcattgtcttggcacacttgttggaaatcaattgataaaaaatatgagggtttattttgggttcccaattctatttcattgatctgtgtgtatcttgattactatagctttgtagtaagttttgaaatcaggaactatgagtcccttggtttatttcttctttttcaagattgttttggctattctgagtaccttagatttccatatgaactttaagatcagtttgtcaatttatacaaaaaagtccattgagatttttgataggattgtattgaatctgtatgttaatttaggaaatattgccctcttaacagtgttatgtcttctaatccataaatacatatttaggttttctttcatttgaacactgtgttgtagtagtcagagtatagttttgtacttcttaggttaaatttatttttagcattttattctttttgatgttattataaatagaattgtttgcttaatctttcatgttgcttattgctactgtattaaaaacccaatttccttttctgtattgttcttatatctgcagccttgctgagtttattagttctaacaggtttttggtgggatcataccatctgcaaatagagatagttttacttcttcctttccaatctgggtgccttttatttcattgtcttgcctagttgccctagctaggatcttaaatacaatgttgaatagaagtagaatgttcagtcattctacaataaagtcctaggttcaagaacttaagattaatagttggtgacactgcaaaggcacacatctatgagtggtgaatccaagatgctgatagatatatacactcatagtttctacttctggtaagctttagtcaaacatggtcacttttgttatcttttaacaaattaattttttatagtgaaaatttagattatttggagaaatctataaaatccatttttctctccaatttagtgagcaatatgcttacagactctggaaacagataaagcatggtccttgcacagtagatgaatgtaaacagtactcagtgtactcatgctcttgtgtctctaaggtgcctctgcttttcttaaccattaagaataaaatacaggaatgttggtgctagagggacttattttataaatgaaaaaatagttcattggaggtaaaatcttggccaaggtcactcacacatgttcttccacagagtactaggaatataaagggccctcagttactagttagtgaatgagttaggtttggagacctccagagcttcccctggatttgggagtgagcactgttggatttgaaaggctcagtggtcacctgactccaaacaacaggctgttgacttcccctcctgctctttccaagggatgtttgtggtggctgttgtgcggctagctgacatttctggcctgttgaagccagaaggtgtttagaatctagagtagtcatctccctgctaaacagctagaggtctggtctgagtagatttgttctcagcagctgtagtttgtgatggtaatcttctctaaggttgcagtgtgagggtggggcttggcagggcaaaggagtatcttagtagccttcccattaaatctgctacctagaagggaattcctaatagagaaagaagagacacttattgtgctaccctttgttcatgtatgttctcttttaagccaccccttttatcccacaaccctttaaaatgctggcaaaggaagagtgtgtgtttcttttctttctttctttcttttttaattgacaggagaattggaggtccagagaagttacttgcctaaaattctgtattacattgaaggggtactggcagggcaggtgatgggacagtacacttacttggaagagactgtgtcttctgagttaagatcctttccatttttcatagttgtttgagtatggatagtttgtgtataagagttattagggagctcttctaggccttgacgtgaaattctaataaagagccaccccagcagtaagcatccagtgctacgattctgtgactgtttggctggtgctcacagttaggatcaatggctaattaaaatgaaaaggtgcattgattactaaccaataacaacttattctgccactctcaagtaaagacaaacccttggactcccctgaacttgtttcacctaggtcctttctgttaatatagaacaggaagcatatagttagaatttagaagtctatgtgattaataaaggagtgtttttaaagtagataatttgaatactttcagttgtcttttagcttgctgaacttcatctctttctcatgccttccctttgctcactttgaactcagaaacttgagaggagttacattatacagtgggtacagacccctaggtttgaatccaggctctgtcatttactctctgtgtgataattgtttacttaacctctctgtgccagaacttgttacatggagaaataatatgtcatcatattgcaatgatgattaaatgagttaatacatacaaaatgcttaaaagagtacctggcatgaaatatgaactcagaacatgttagctgtttattgttaaaagtacttataaagaatattattactaccactgctactacaactacagctcttctggtccaagttgaattacctgtaattcagttgtactttaaaaagggctaaaggtggcttgtgttttatatataccttccttttttagcagctggaatgttcagggatcataggagagcgagccctgttcacaggcatgctgtaaaatcccttcctgattcccttgactgtgctttctaagcacctgggaaagcattcctgttggactggatctagctcagggtattgcaagctcacttagtgtgggaaaaccaaacacattttaagcaaatgaactagatttagagattagcgaaaagtcctaattttagtaccagcctgggtacaacacataaaaggagaaatacagccaatgctcctggttcactttctgatttttcgagattacctgattccttggaaaactagtaacacaaatgtgggcatagagaaaataattttccttcctttcggatttagataggaaacaggaacagattgtcccaaaaggtatctactgtcctgatgtagcacttgctgtgaatctctaagccttttttcttgtaatttctggaaagttcctggcttccaggaattatagctggaatccctcagtacctgcatgtttcaggcacacagttaaatgggattaaagtgcagttatataattaaacagaacttcctcctgagttgtgttttaacacctggtctcttcctgtcctgatcaacaggtatctcagatgaagacatcatcaacattactcttcctactggagtccccattcttctggaattggatgaaaacctgcgtgctgttgggcctcatcagttcctgggtgaccaagaggcgatccaagcagccattaagaaagtagaagatcaaggaaaagtgaaacaagctaaaaaatagtctttctcaactgttggctaagaagaaatgcaaaagaagtggcataggagtgtgttatgggtgctgaactctctctctttttccccgattttccagagctaggctgtggagtagagtttgtataggtaactaggtaacttattgtggcccagataaggctttaggatgcctcagtgcttatgtcatagccttatgagttagctttcttgctagccccctagtcggtcaccaaactagtaactagtggggcttaatgaaggtcataagtttctgagatgggagagcaacaagtagagatgaagttaaaggtatttatcattcaagaaatcattattgagtcaccattgacaggcactattctaatcagtagttcactttaatatttaataagattttctgggataacagtaagggatattagataatataccgtatgtatttattactagtcttttcctctaggaaaagggatactttgataattaaggccagaggcccattagttgagaaagtcacagatatatttctccaagaaagccaacaaccaccaccacaatgacagaaatgacaacaaggccctttaacttgtcttctagtttagagacatccttcatttgacatttagtagaattcctctttggccacaagaataagcagcaaataaacaactatggctgttgaggttctcattttggtttgttttaattttttgaactttgggtacctgtaattagtttaaaaataaagttcctgataataaagtgactgaaaatggcatccccaaagtgtctccgtgtgtttggtgaattttaggtaggcttctaaactagtctttgactcatactttcctgtaacactcaaagaaagaattgcacttatttcaacacaacagatactcatgattttctatatgttgaagcatgaagcagggaaggtagaatacagtgcatgtaacttcattcacataagcagagggaatggtatattggggcttgtgacataaatttgttcattaactaactgatggcaaaagattatggtatgtagcacggagcagtcagggtaggccatggacacgattgcatatctgtcttaatgatactcttttgcactatgttttagatgctgtgggtacgtaagtcatcatttctttaagccgttgactctgtttcaaagcaggtcacatatatttcgatgataaagtcatgtaaaacatttgtagctataatacctgttatagatattttccatttttttcatggtttttcattggattagtttatttttatccactttatagtacaattggcatttgaagaatactaactttaaagtatttttgctactgctttgtctccatttgattattaacgcaagacttttaacgattagccaaagaagatggttgaaaagaagaacctgctctgcctgcagctggccacatctgtgatgcataaggacatggaatgtggatgctttacatttattaattacctactattggtttctctagtgtagccccttcgttttagtggtgttgattaaccaagtaatactctagaattcaaatatcagggtcaagaatgcaactaccagatgatgttcgtagaattccaaacctatggctaggctgccatagtgatattcacaccatttttgaatatcatcatctctggaactggcctctgagttttccagcccaaggggtgaccatgtcttaatgtacttcaagatcctagagttggattcttccattgtcctgcatcaaggtatcttcttccagggaaccttctggcagcatgatgtgcttctgcacacaaagcaactgtcatatccagtcactttagaatctcacaggcttcccaagaaaaggatgatttttgctaatacagtactctgtgatacaatttggtcttactgtttttgagatcttggctgaaaaaatatgaacagaagagcctttttttttttttttttgagacggagtctcacacttttgcttaggctggagtgcagtggcacgacctcggctcactgcaagctccacctcccgggttcatgccattctcctgcctcagcctcccgagtagctgagactacaggtgcccgccaccacacctggctaattttttgtatttttagtagagatggggtttcaccatgttagccaggatggtctcaatctcccaacctcgtgatccacccccctcggcctcccaaagtgctgggattacaggcgtgagccaccgtgcccggccaagacatttttttaaatgtcacttaaaattagttaacaactccagcacttcaaccttaggatcacctagtgaacctgttttctttgcattgttaacagtttatccagaatttctgatgcaggaatcttgaaggctgcttattctctatcccagtcttggcatccttctattctgaggctgggacagaaattagggatttattttctcctataaaaaaaaaagagggaatgacaatgaccagcccagccatggtggcccctgcctgtaatcccagcactctgggaggctgaggcaggaggattgctcgagctgagaaattcgagagcagcctaggcaacatagcaagactttgtctctactgaagaaaaaaaagacagcctatctaggaattaggtccttggaggaggcagcctatcctgctgccagtttacgctttccctggagccagctatgcatgtctcctctgcccaggctgagatgattgtcccatgtgggtcagtgtggcaagataaaggcaatagcaacatcagctgctcccagagttttaacttttaaaaagcctctcaaactagtaccgtatcccagtacactgagaatggtttttctaaaagagcagtactgcatcagaagagaagattttgcattgtgtagtaccaatatgggcatcaaattaacgaaatatccttggttagaatacattatggctaatgtatttttccttgataaggtgtgcaaggaagatgaatgtgatgatctatttccaagctcaaccagactcttttgctcaacatttgtaagttatttctcatcccaggttgtgaccacgtttattaacatgcagttcccaacgtgcacattaataacagttgttatttgtctcctggcctggaatttcgacttgtatgtaatctatattatctctggttactatttagaagcctgttagcttgctgtgtgtgacttctgcaagatgatgtgggataatttggtaactctgatgttcaagtgcataaagatgaaaatgttgctgagactatttttactacgtaattctgaaacaattatgtagcgttaaaaatgagtataaatgtattgatgttattgtaagtgaggttactcaccatgggagaagaaagatacggaatggaggaaggtaaggaaggaccatgtggtatattggttctggatgagaggtgtttgtgtaagagtgtgtgtgtgtgtgtgtgtgtgtgtgtgtgtgtgtgtgtgtgtgtgtgtattttccactctctttcccccaagcccctccctactaactctggctctgtcttctgaaagggcctagaaacaataacccagaaacaacaaacacactgaattccttcaatcttggttcataaacactattccacagaagcaggcatgtttggggaaatgcctgcttccaggtttgaggcagatgaagcataaggtgaactttgagcacttttctgactcatcaagatgttacaagactgatgggacacagacatttgcttgaaggaccaaatttggggcaatttaaagtaagaaaaagaatgatggtaatgaattatagaacattgaattcaaaaaatagtgcctaagaccataaaggtatttttttaaaggtggggagagaaaaaggagacataaatatatactgtttctttacagaagattgccagcttccattggtaataatggatgcaagcaaggactattaatggatgctaaaaccactgggcttttagagaactgaacattcgcatagtcttataataaacttattaattacaaagaaaaaatgtatcttcacaatggagagatcccttagacactactgcaaccgagtgattaaccttaaaatctccaatggatgggtcaaatagatagtatgtgattttatgcatgtccttgttattataaatcagtgggaggtacctatcacttagtcttcttcccaaaaactttttatctaaatctaataatgagaaagcaatatgacacattcaaaatacaggataccctaaaagacaactggtttggacttttaaaaaatatcaaggccaaaaaataaacacaaaaatatgaagggacagttccagattaaatgacactatagggacatgatagtgaaatgtaattcgtgaactttaattggatctttagcttgtaaaaatttacaaagaatattttggggcacttgggaaaattaaaatatgtgtctatgtaggctgggtgcggtggctcacgcctgtaatcccaacactttgggaggccaaggcaggcggatcacttgaggttaggagttcaagaccagcctggccaacatggtgaaaccctgtctctactaagtatatgaaaattaaccaggcaaggtgacagtcacctgtaatcccagctacttgggaggctgaggcaggagaatcgcttgaacccgggaggtggacgttgcagtgagctgagatcatgccactgcactccagcctgggcgacagagggagactccatcaccgccccccccaccgccgccaccctgccaaaaaaaaaaaaaatctgtctctgtattaggtgataataaatattaaatttattgggtatagcaatggtatggtgccttgttcttaggagacagctgctgaagaatttaagggtaaggcatcctgttatcagtaagtcatttgtaaatggctcagccaacacaatgtttctatatttttagagacagaaagcaaacaccggtcattggtcacttaatgatgcgacttgttctgagaaatggattcttagatggttttgtcatcgtgtgaacatcatagagtatactacacaaacataaaaaatatggtttagcctattgcttctacgctaaagacttgtgcagcatgttactgtactgaatacggcaggcaattgtaatacaatggtaagtatttgtgtgtccaaacatatctaaacatagaaaaggtacagtaaaaatacattataaaagattaaaaagtggcacatttgcgtagggcacttaccatgcatagaacttgtgagaatggaagttgctctgggtgagtcagtgagcgagtagtgagtgagtgtgaaggcttaggacattactgtacactacagtagacttcataaacactataccctttgtctacactaaatttatttaaaaaattttcttcaataataaattaaccttagcttactgtaacttttaaaaagtttttaatatttcaaaaccttttgacttttgtaataacacattaaaacagaaaccttatttaaccatatgaaaatattttctttatgtcattataagtttctttctttcttttttttttttttttttttgagacggagtttcgctgtttctcccaggctggaagtgcagtagtgcgatcttggctcactgcagcctctacctcctgggttcaagtgaccctcctgcctcagctcccgagtaactggaattacaggcgcaccacaccatgcctggctaatcttttgtatttttagtagagacggggtttcaccatgttgcccaggctggtctcgaactcatggactcaagtgatccgcccgccttggcctcccaaagtgctgggattacaggtgtgagctaccacgcccagctataagcttcttcctataaaattttttattttttaccttttaaactttcttgttaaaagctaagacacaaataccacattagcccaggcctacacaggatcaggatcatcagtgtcactgtcttccgcctccacatcttgtcccactggagggtcttcaggggcactaacatgcatggagctgtcatctcccatgttaacaatgccttcttctagaatactacctgaaggatttgcctgaggctgtcttacagttaactaatatttttaataaatagaaggagtatattctaaaacgataagaaaaagtatagtatagtaaatacaaaaaacactatcatttattatcattttcaggtattacatactgtacatccttgtatgtgctatacttttgtatgactggcagtgcagtaggtttgtttacaccagcatcaccacaaacacatgagtaatggctcatgctaggaccttaggatggctataagtcactgcacaacaggaatttttcagccccattataatcttacatcgtatatgcagtccgctgttgaccaaaacagcacatgactgaggcacatgactgtacagtaaatgtcatagctgatgaattgaggaaatgatttgtaatgttgtattattctactatcatctcagcatttctgtaggtttgaaatttttttaaaaaactagaaaaaataaagtgacagaggaaaaaattggtaagtttaacaatgttgtgtttagtatagtcattaaaacatgtcttattcagagtgaggtgcctggtttttttgactttttattcttgaaacctcagtctttgttaagtaagagaaagataagagaaagccttcttcttttcttcttttttttttctgtcttttgagacagggtcttgctttgtcgcccaggctggagtgcaatggtgtgatcttggttcactgcgacctctgcccccccaggttcaagcaattcttgtgcctcagcctcccgagtagctgggattacaggtgcccgccaccatgcttggctaatctttgtatttttattagagatggagtttcaccatgttgaccaggctggtctcaaactcctgacctcaagtgattcgcccgcctcagcctcccaaagtgctgggattacaggcatgagccaccacacctggcccaagagaaagacttcttaagtctgtattatcttgtcaagaaacaaattgtatacttattttatttctattatctttgaggctacagcttgcatcagaccagcaatgagcttgtgtgctgaaacaacaaatctgaaacacgattatgactgccatcaccttgcagttaaccaatagtaatggaattcctttctggatcacgaggtcaagagttcaagactagcctgaccaacatggtgagaccctgtctctactaaaaatacaaaaattagctgggcgtggtggcacgtgcctgtaatcccagctactcaggaggctgaggcaggagaatcacttgaacccgggagatggaggttgcagtgagccaagatcacgccactgaactcctgtctgggcaacagagtgaaactccatcacaaaaaaaaaaaaaaaaaaaaaattctcgtgaacttaaccctaaccacacagtattgaagagggaatgtctgcccaaccacactgctttgtatctgcctgagaggaaaattctctggatgtcgtgttgaactggatggggaatcagacagagctggagtttgtattagtcagattaattgcataaaatctacccttagtgggaagactcttaggagtaattgaacctagaccttgacatatgtaacctctgaagcagaggggcaaaggccaacacatagctctgcaacacaattgaggctatgtaatccatcccgacactcattctgtagaatactcattagaattctccagacctaaggccgctggccataggttagctagtcagtatttttatctctgaggatgcctgctaggatcctgggattggattgcagggaatgttacttgtagctggaattccaggtactctcccaggagtcttggtattttatatcgtttttaaaatctttgtttctgtacgtagacactgggggtcagtatttattcataaatgcctctggatatttatgacaaaagattgtttctaaagaggcttggaattccttcctcggtgcgacttctttccctgattattaactatagagtttaccctatgtaaccataaaatgtaaatataaacatcatagatgtccatggatcagaatatgggaaaggggcaggcagttttccatctaaaatacgaatgaataccaagtactcgtttgtttctagacacttgtttggcaatgttggtcccaccagtgcacccagatgtctagccagcatcttgacaatcacccttgacttttcttcttctgatggttatgaagtcctgctgattccgtcacctcttaccttgcaaattcatcccctctccatccccactgttctgccttgagttaagccctcatcttttctctttcaacatttcagcagccttctagctgatccccttgcttccgcttttactctcctctagtcctctccagacagtcgtcagggtaattcttcagaccttcagaggtccagcacccctcctaggctctgcctttgcacccgctgtccccttggccttgaactaccctccatcacccaccccaccttgccctcttttcattgcctgcctaatatctgctcatctttcagggttcgtaacagtctcctgtggagccctgtgatcgactcttgctggatctggcttgttcacttgtctgttcgcttcactggcaggagaactgaatggatttaagtctgggtgccagccaaagtcatgcaaacttaaactccagaattccctagaattatccacttggggggccaaactgcccactgttttagatttgttctttaaaatatttctcgcagctgggtttttgttttctttttttcttcctatttttttttttcttttggagacagagtttcacacttgtcgcccagactggagtgcaatggcacaatggcacgatctcaggtaacggcaccctccacctcccaggttcaagtgattctcctgcctcagcctcccaagtaactggggttacaggcacgcaccaccatgcccagctaattttttgtatttttagtagagacagggtttcaccatgtcggccaggctggtctcgaactcctgacctcaggtgatccacccgcctcggcctcccaaagtgctgggattacaggtgtaaaccactgtgcctggcctaaaatatttctcctggctggcatttgatctgacctgtctgttctctgcggctgtcttcctaccatgccaatacatggaagcagaggtggaaatcctaccactgccggacaggaaggcaggtgaggctaagtagcctgtcagcaccgagcccttctccataggcagctgctataatggtacagaaacaggttacttatggagttgcaacctgtttttaacctgtaattatagagttaaatataaccatataaacatcttgaaaataagtgggaaagattccctaatgttcccatcctaagaactattttatttctttctttctatatgcatgtttcacttagacatattcttgatttatattcatattttattcttgtctttatcataaggatttctccatgttgtatagacttcaaacaattttactccatggctgaacactgttgcatcatttggatagaacttaaatgtccaacaggaaaaaaaaattaggtgctttcaatgttttgctgtaagtaatgtctaaatatttaaaaactcaaccaagctaataaactgctatataaaatatgttttgtatattttttatgccttgaaaaatatacctttataacaaaaagtactttaaaatatataaagccattttatatgactaaaagccaccacgcatcatcaaggatggtgatgacagtcttctctgaaaaggtttcatatatattgaactttgaatgattttgtgtgtgtttgcgtaagtgtgtgtgtgtacctgtacatgcgctccaggctgaagaagtaacaagtgcaatagtcctgagacagaagagagtgtttaggcaacagataataggtaaggtcagtgtaacctgaacaacttgaagaaggtgtttaggcaacagacaacagctaaggtcagtagtgaaggctgaagtggtgtaggatgggattggggaggtaggcagaagccaaattgagccatggtagggtgaacggaagacaggaaaggtcttccaagccaaagagtagcccagtagcccatgccctcattgccactgaagagcttctgccatctgagcatgtaatctctccaagacaacatttacgttcttgtgtaaacatagatcattgtgtagcataatctctataagaattgtaattcctatcatatttaaaaagagagtaacaaggagacttcagtgtttctaaatgcaccccttctgaaagcatttaaatcttgattttaaattttatcatttagctacaatgaataagctcccctgggtcattctctaatggcaatttaagccaggtcttggatcttgtttaatcctcacaataatattctgaggtgaacatttttattatattcatcttacagatgagcctcacaaaacctgagtagcaagacacagtcgcaaagctagtatatagctgcagcaagattcaaatccaagttgacctaactccaaagcccacgctcttggccactgtcccatactgtttttagtttaattttttttttttttgagacagagtctcgctctgtcacccaggctggagtatagt

SEQ ID NO: 387 - DNA, 1874 bp, Homo sapiens
aagataaactctcttctggatgtctgaggtactgtgtagcagagcccttccaatagtaagatcccctggaaggaagcagggcgatgccgctgtatttagggttctggcagacctggccctatctatcattttgtgtagtagacagaaaaactcgaatgcggtgaaaagagaaggaggtgaatatatgcagtgttttcatgtaggaatctggagccaaatcacaagttcttagaaccactagaaataaaaacatgtattgctgtccttgaatattagcccatttgaaaacgcctgggaagttcagccatcagtatgtccaagtacaaacttattatgttaagacatggagagggtgcttggaataaggagaaccgtttttgtagctgggtggatcagaaactcaacagcgaaggaatggaggaagctcggaactgtgggaagcaactcaaagcgttaaactttgagtttgatcttgtattcacatctgtccttaatcggtccattcacacagcctggctgatcctggaagagctaggccaggaatgggtgcctgtggaaagctcctggcgtctaaatgagcgtcactatggggccttgatcggtctcaacagggagcagatggctttgaatcatggtgaagaacaagtgaggctctggagaagaagctacaatgtaaccccgcctcccattgaggagtctcatccttactaccaagaaatctacaacgaccggaggtataaagtatgcgatgtgcccttggatcaactgccacggtcggaaagcttaaaggatgttctggagagactccttccctattggaatgaaaggattgctcccgaagtattacgtggcaaaaccattctgatatctgctcatggaaatagcagtagggcactcctaaaacacctggaaggtatctcagatgaagacatcatcaacattactcttcctactggagtccccattcttctggaattggatgaaaacctgcgtgctgttgggcctcatcagttcctgggtgaccaagaggcgatccaagcagccattaagaaagtagaagatcaaggaaaagtgaaacaagctaaaaaatagtctttctcaactgttggctaagaagaaatgcaaaagaagtggcataggagtgtgttatgggtgctgaactctctctctttttccccgattttccagagctaggctgtggagtagagtttgtataggtaactaggtaacttattgtggcccagataaggctttaggatgcctcagtgcttatgtcatagccttatgagttagctttcttgctagccccctagtcggtcaccaaactagtaactagtggggcttaatgaaggtcataagtttctgagatgggagagcaacaagtagagatgaagttaaaggtatttatcattcaagaaatcattattgagtcaccattgacaggcactattctaatcagtagttcactttaatatttaataagattttctgggataacagtaagggatattagataatataccgtatgtatttattactagtcttttcctctaggaaaagggatactttgataattaaggccagaggcccattagttgagaaagtcacagatatatttctccaagaaagccaacaaccaccaccacaatgacagaaatgacaacaaggccctttaacttgtcttctagtttagagacatccttcatttgacatttagtagaattcctctttggccacaagaataagcagcaaataaacaactatggctgttgaggttctcattttggtttgttttaattttttgaactttgggtacctgtaattagtttaaaaataaagttcctgataataaagtgactgaaaatggcatcccc

SEQ ID NO: 388 - protein, 255 aa, Homo sapiens
MSKYKLIMLRHGEGAWNKENRFCSWVDQKLNSEGMEEARNCGKQLKALNFEFDLVFTSVLNRSIHTAWLIELGQEWVPVESSWRLNERHYGALIQREQMALNHGEEQVRLWRRSYNVTPPPIEESHPYYQEIYNDRRYKVCDVPLDQLPRSESLKDVLERLLPYWNERIAPEVLRGKTILISAHGNSSRALLKHLEGISDEDIINITLPTGVPILLELDENLRAVGPHQFLGDQEAIQAAIKKVEDQGKVKQAKK

SEQ ID NO: 389 - DNA, 2055 bp, Homo sapiens
aaaagagcgtcgatgccggcggcagtgatgagtcctaggaggcgctggctctttggcggctcggaggagcggctgctgctgctgctgctgctgctggtggcccctttgcagaaaagttctaagaacagtgctgttggctcagtgagatgaggttatcggaaaactttctgtttacacaagagttgcctccttcaaagaagcatgcatggtccttgcaggtcactgtgcccatcactctgcatagtccagctgcactctgcttcacacagctgcctgcccattgcaggcatttgagtttgcaatccatgccttaaactttaaatcacactggctacagcgttgtgtgtttcttggtaaacactgggtaaatcagctcctgtggatgttgactgaagtttctatgtttgcaagctaatcctcagcagtttctttatgtattgctgtccttgaatattagcccatttgaaaacgcctgggaagttcagccatcagtatgtccaagtacaaacttattatgttaagacatggagagggtgcttggaataaggagaaccgtttttgtagctgggtggatcagaaactcaacagcgaaggaatggaggaagctcggaactgtgggaagcaactcaaagcgttaaactttgagtttgatcttgtattcacatctgtccttaatcggtccattcacacagcctggctgatcctggaagagctaggccaggaatgggtgcctgtggaaagctcctggcgtctaaatgagcgtcactatggggccttgatcggtctcaacagggagcagatggctttgaatcatggtgaagaacaagtgaggctctggagaagaagctacaatgtaaccccgcctcccattgaggagtctcatccttactaccaagaaatctacaacgaccggaggtataaagtatgcgatgtgcccttggatcaactgccacggtcggaaagcttaaaggatgttctggagagactccttccctattggaatgaaaggattgctcccgaagtattacgtggcaaaaccattctgatatctgctcatggaaatagcagtagggcactcctaaaacacctggaaggtatctcagatgaagacatcatcaacattactcttcctactggagtccccattcttctggaattggatgaaaacctgcgtgctgttgggcctcatcagttcctgggtgaccaagaggcgatccaagcagccattaagaaagtagaagatcaaggaaaagtgaaacaagctaaaaaatagtctttctcaactgttggctaagaagaaatgcaaaagaagtggcataggagtgtgttatgggtgctgaactctctctctttttccccgattttccagagctaggctgtggagtagagtttgtataggtaactaggtaacttattgtggcccagataaggctttaggatgcctcagtgcttatgtcatagccttatgagttagctttcttgctagccccctagtcggtcaccaaactagtaactagtggggcttaatgaaggtcataagtttctgagatgggagagcaacaagtagagatgaagttaaaggtatttatcattcaagaaatcattattgagtcaccattgacaggcactattctaatcagtagttcactttaatatttaataagattttctgggataacagtaagggatattagataatataccgtatgtatttattactagtcttttcctctaggaaaagggatactttgataattaaggccagaggcccattagttgagaaagtcacagatatatttctccaagaaagccaacaaccaccaccacaatgacagaaatgacaacaaggccctttaacttgtcttctagtttagagacatccttcatttgacatttagtagaattcctctttggccacaagaataagcagcaaataaacaactatggctgttgaggttctcattttggtttgttttaattttttgaactttgggtacctgtaattagtttaaaaataaagttcctgataataaagtgactgaaaatggcatcccc

SEQ ID NO: 390 - protein, 255 aa, Homo sapiens; identical to SEQ ID NO: 388

SEQ ID NO: 391 - DNA, 1734 bp, Homo sapiens
aaaagagcgtcgatgccggcggcagtgatgagtcctaggaggcgctggctctttggcggctcggaggagcggctgctgctgctgctgctgctgctggtggcccctttgcagatgtattgctgtccttgaatattagcccatttgaaaacgcctgggaagttcagccatcagtatgtccaagtacaaacttattatgttaagacatggagagggtgcttggaataaggagaaccgtttttgtagctgggtggatcagaaactcaacagcgaaggaatggaggaagctcggaactgtgggaagcaactcaaagcgttaaactttgagtttgatcttgtattcacatctgtccttaatcggtccattcacacagcctggctgatcctggaagagctaggccaggaatgggtgcctgtggaaagctcctggcgtctaaatgagcgtcactatggggccttgatcggtctcaacagggagcagatggctttgaatcatggtgaagaacaagtgaggctctggagaagaagctacaatgtaaccccgcctcccattgaggagtctcatccttactaccaagaaatctacaacgaccggaggtataaagtatgcgatgtgcccttggatcaactgccacggtcggaaagcttaaaggatgttctggagagactccttccctattggaatgaaaggattgctcccgaagtattacgtggcaaaaccattctgatatctgctcatggaaatagcagtagggcactcctaaaacacctggaaggtatctcagatgaagacatcatcaacattactcttcctactggagtccccattcttctggaattggatgaaaacctgcgtgctgttgggcctcatcagttcctgggtgaccaagaggcgatccaagcagccattaagaaagtagaagatcaaggaaaagtgaaacaagctaaaaaatagtctttctcaactgttggctaagaagaaatgcaaaagaagtggcataggagtgtgttatgggtgctgaactctctctctttttccccgattttccagagctaggctgtggagtagagtttgtataggtaactaggtaacttattgtggcccagataaggctttaggatgcctcagtgcttatgtcatagccttatgagttagctttcttgctagccccctagtcggtcaccaaactagtaactagtggggcttaatgaaggtcataagtttctgagatgggagagcaacaagtagagatgaagttaaaggtatttatcattcaagaaatcattattgagtcaccattgacaggcactattctaatcagtagttcactttaatatttaataagattttctgggataacagtaagggatattagataatataccgtatgtatttattactagtcttttcctctaggaaaagggatactttgataattaaggccagaggcccattagttgagaaagtcacagatatatttctccaagaaagccaacaaccaccaccacaatgacagaaatgacaacaaggccctttaacttgtcttctagtttagagacatccttcatttgacatttagtagaattcctctttggccacaagaataagcagcaaataaacaactatggctgttgaggttctcattttggtttgttttaattttttgaactttgggtacctgtaattagtttaaaaataaagttcctgataataaagtgactgaaaatggcatcccc

SEQ ID NO: 392 - protein, 255 aa, Homo sapiens; identical to SEQ ID NO: 388

SEQ ID NO: 393 - DNA, 1682 bp, Homo sapiens
tgcatctggatttattcctgctgaaaactctatcttgaggtaggtgcaagattatttagatgtattgctgtccttgaatattagcccatttgaaaacgcctgggaagttcagccatcagtatgtccaagtacaaacttattatgttaagacatggagagggtgcttggaataaggagaaccgtttttgtagctgggtggatcagaaactcaacagcgaaggaatggaggaagctcggaactgtgggaagcaactcaaagcgttaaactttgagtttgatcttgtattcacatctgtccttaatcggtccattcacacagcctggctgatcctggaagagctaggccaggaatgggtgcctgtggaaagctcctggcgtctaaatgagcgtcactatggggccttgatcggtctcaacagggagcagatggctttgaatcatggtgaagaacaagtgaggctctggagaagaagctacaatgtaaccccgcctcccattgaggagtctcatccttactaccaagaaatctacaacgaccggaggtataaagtatgcgatgtgcccttggatcaactgccacggtcggaaagcttaaaggatgttctggagagactccttccctattggaatgaaaggattgctcccgaagtattacgtggcaaaaccattctgatatctgctcatggaaatagcagtagggcactcctaaaacacctggaaggtatctcagatgaagacatcatcaacattactcttcctactggagtccccattcttctggaattggatgaaaacctgcgtgctgttgggcctcatcagttcctgggtgaccaagaggcgatccaagcagccattaagaaagtagaagatcaaggaaaagtgaaacaagctaaaaaatagtctttctcaactgttggctaagaagaaatgcaaaagaagtggcataggagtgtgttatgggtgctgaactctctctctttttccccgattttccagagctaggctgtggagtagagtttgtataggtaactaggtaacttattgtggcccagataaggctttaggatgcctcagtgcttatgtcatagccttatgagttagctttcttgctagccccctagtcggtcaccaaactagtaactagtggggcttaatgaaggtcataagtttctgagatgggagagcaacaagtagagatgaagttaaaggtatttatcattcaagaaatcattattgagtcaccattgacaggcactattctaatcagtagttcactttaatatttaataagattttctgggataacagtaagggatattagataatataccgtatgtatttattactagtcttttcctctaggaaaagggatactttgataattaaggccagaggcccattagttgagaaagtcacagatatatttctccaagaaagccaacaaccaccaccacaatgacagaaatgacaacaaggccctttaacttgtcttctagtttagagacatccttcatttgacatttagtagaattcctctttggccacaagaataagcagcaaataaacaactatggctgttgaggttctcattttggtttgttttaattttttgaactttgggtacctgtaattagtttaaaaataaagttcctgataataaagtgactgaaaatggcatcccc

SEQ ID NO: 394 - protein, 255 aa, Homo sapiens; identical to SEQ ID NO: 388

SEQ ID NO: 395 - DNA, 54037 bp, Mus musculus
  misc_feature (1)...(54037): n = A,T,C or G
tttcataaagtcattgtcattgaagtgaaggtccattatcaaggaagtcagaaatttgtgaaatctgagtcttccttgttatcatcatgtgtatgctatgacattcaacaggaaggaaaggactccttctgtactcagggcctgagatcccctcactgggggggtctaatgacactaccttcctaggagacactgccctttcccagcaagcatggaaccactgttgtcagccagacagctaagtgttaacatgatgctttcttctttttgcaaaccagaatcatggtgtcttagggagcaccctaaaaactgcttctccagacttactttactcatagactataaatctgcagctgggagacgaaaggatagaccaaccagagactgctccacccgagggtccatcccataatcagccaccaaatgcagacactattgcatacactagcaagattttgctgaaaggaccctgatattgctgtctcttgtgaggctatgccagtgcctggcaaacacagaagtggatgctcaaagtcagctattggatggaacacaggacccccaatggaggagctagagaaagtacccaaggagctgaaggggtctgcaaccctataggtggaacaacaatatgaactaaacagtacctccagagcttgtgtctctagttgcatatgtagcagaagatggcctagtcagccatcattgggaagagaggccccttggtcttgcaaactttatatgcctcagtacaggggaacaacagggacaaaaagtgggagtgggtgggtaggggagcagggaggggggagggcataggggactttcgggatagcatttgaaatgtaaatgaagaaaatacctaataaaaaattggaaaaaaaaattgcagccggctggccatcagcactgacatagcttcagcagcctgagtaaacgcccatcattctagtctgccttcagatttggtctctacctcacctcaagctgtgcacctagatgcagtggggctgtatgactggacagatgcacaagccttactgtgaggtaccaggggttattcatggacaactacaaaggagagacatgaagcctgagctgagcaagtgtagctatcaatgggtggtggaggaagaagctggaggaagaagcccagtcactggcccagacaccgcagcatatgaaagctgccagccagcagttagggggatgtgactacatcagtgtgtgagagtagctctatgatcagtctacacagtcagtcttctaacatagaggtggtgtgtgttttgggtgttagtaggaaacaggtctgtgcctatgttcactgccactctggtacctgcaagaactatctgtggctatgggagccagtcctgggcccagatccatccacctgaatgagcagtggccttggcactggttcctccattattgagagccagtaggtgtttgttgctccataaccccatgtttaagttccattgttggaggggccattgctcctgacttccctcctacctgccagttctccaggatcctgagtagcctctagagcctccttctgcatcctgtttggttttgggtcagcttggttgcctggtctctagacctcgtaccaaagcttactacctgagcgataggaagctccgaggcttgtgccatgtgtgttcattgtccaccttaagttcagtctgctttggaacccttgtccaactctatcagtgcttctgagacctgggcctgatctctatttccatgagtggaatagcttctgcaggtggcaatgctaagacctagctttctcgtgtttccctttttttggagctgcaatgggcatttgctgcaccttggatcactatccccacagcttggtcctgacctgtcctgattccacccaacgtttctggtaacaccgtgagccctccctgccggagtctcaatggggtgctgttctacccagtttccctctctgatctgtgtgcttcagaactgcaactgttgcccagaagaatattgggttttgtggtttttttttttaatctactgagagactaactctccctcaaagtttttccaggaaccttcctagacttcctttggcctcagtttccctatgttcaaatttagctggctggctgccccatgttcaaattaagccagctccctagctgctgctccagtctgtatccaggaaaggcagtggtgtcgttataaacctgtggagcagtgcttcccaaccttcctaatgctgccaccctttaacgcagctcttcacgttgtggtgacccccaaccatacaatcattcggttgctacttcgtaactgtaattctactgttatgaattgtaacgtaggcatctgatatgcagcgtatctgatatgtgacccacaggttgagtaccactgtggtgaaatgtcaggatgtgtgagcagatgtgcattcctgctggggtggggtagggaggaggtggtcacacagtcaaggggccttggagtcctgactgagtcacagcaacctcctaggctgtcatactcacatcagaagcagaagcacagtcctctctatactctttcttctagactaaggagcaaggtcgtgtctatattcacctctacaggagagcacacacagccctgtctataccagctttctttctccatggtaaacgtttatgatacaaaagcacagcagaacaaacactactttggcatctctgattcaagggaaaaatatataaaataagtgttatcatgtttgccatgattgaacaaggggttggtgctgatagtggctggaaaaaaaagcaagcatgcccttcctagaatataaaccctacccaacaagacaacaaagaaacccatttccgagcccagctactctcctagtgagccactgtaggtttcctatgtcttaaatatctatcttcaacagttccccttgtctgtaccctcttcagtagacacccaaacacaagtgcacaggtcttcccagtttaagacctggcagaataaattcctatcacaggaatcaggaatgctgtctgtcttccagctgacattacaagctggctccctgttctcccatgagctgatacttggcccttcctatcggcctcttgatcttttgcaggtgcacagggatgaggggggagaacatcaccaaggtcagcaccttcatcctgctgggcttccccacagcccctgagctgcaatacctgctcttcctcctcttcctgctcgcctacctctttgtgctggtggagaacctgaccatcatcctcactgtctggagcagcgcctccctccacagacccatgtactacttcctgggatccttgtctttcctagagatctggtatgtgtcagacatcatccccaaaatgctggatggcttcctcttgcagaggaaacgcatctctttcattggatgcatgactcagctctacttcttcagctccctggtatgtacagagtgtgtactcctggcttccatggcctatgaccgctatgtggccatctgccaccccctgcgctaccaagtcatcatgaccacagggctgtgtgtccagcttgtggccttctcttttgctagtggcttcaccatctctgtgattaaggtctactttatctccagcgccaccttctgtggctccaatgtcttgaaccacttcttctgtgacatctcccccatcctcaagctggcctgcactgacttctctactgcagagctggtggacttcatcctggccttcatcattctggtgttcccactcttggccaccattctctcctatggccacatcaccctggctgtgctgcgcatcccttcagccacaggccggtggagagccttctccacctgtgcttcccacctcactgtggtcaccttcttctacatggccatgatcttcatgtatgtgcgaccccaggccattgatacccggagctccaacaagctcatctctgctgtgtacaccgtcctcacgcccatgatgaatcctttgatctactgtctgaggaatactgaatttaaggatgctgtgagaagaactttgggattgggaaatactccccagtagatatctctattggtagagatatctgtagtattctcaacagtaattcaagtaaaacctcttataccacccaaatctatttaacattttaacgaaatttaacaaacctgtaaaactacctacagtaatgagccttcatccaaatgtgctttctgagtgtggactcagggaaccagctcccaggtagatcattgaagttcaccccccagtgaccctctctgcctcaagagaaccgctatgctggtttctaatgccacagagtaacttgagtgtgttgagtttcattaatgtaatcatgaagcacttagagtttcatgttctgctttggctcagccatgtctgggcgtctccctgtctttgcatgtagcaatccatgcattatttcttggttatattcacatgtacatcagcatgcagttctttgctttgctattggctgacagtatcatggatactctctaggatgtgtaatgctgctatatggaatccaggtagtatttttttctaactgctatctgtgcagtttgttgagttacacagaactgtatctaggctggacctagctatatataaggcttatgtgtgtgtaactactgcagcacaaggtgtgtgtgttgccaggtttaatagaaactacacaactgtttttcaaattgcatgtgccagtttagctcctgttggtggtatcccagtggtcccaaacattatgtttcaattcagcctttcttctggactccaaaggtatctcactctgacttaaatctgcattttccaaatgcaaatggttttctgctgacatcaatagtctctccctgtccatttggatataaactctctgatgaacatcttctgcccgtgttcatatggggtctctttacacagaggttttttacatcgtctgattctgagccccctgtcaggtctgagccctctgatgcaaagatcttccaattagttaaatgttgtgtcctcatgggtcttataatgaagaaaagttctttattttaatgtctaatgtgtacatttcaccttatagagactttccatttaagaaacatttgcctctgctaagctcatggaaacgttctcttgtgacatttgtcttttaaatctgtaatctatctgaaagtgaaccctcttttcggatgggaaattgttctagagatcacccattgtttggaagatcacactctgctctaggaagtatcaccttttcataaatcaaatcactggacccctcacccagccagctctttttgtctactcgttgggagccagatagaccagagattcaatcagaggctctcatgaaagaccaaagagaacattagttctgtgtccacgtccaggagtggacttagcaaggctggtctgcaaggagtggactttagcaagcactcaagccagtgccttgagggagtcgggcagtgatttctcttctccctgggctgtggctatcagtcctaaagcagctgtgtctgaggatcctatgttctcttaacaacatggtctgatttagctctctgatgaccttggttaaatgtcccttgcaaatagtatatatgatgctgtcttcgtcagggttcctattcctgcacaaacatcatgaccaagaaacaggttggggaggaaagggtttattcagcttacacttccacactgctgtttatcaccaaaggaagtcaggactggaactcaagcaggtcaggaagcaggagctgatgtagaggccatggagggatgtcacttactggtttgcttttcctgggttgctcagcttgtttttgtttttgtttttgttttgttttgtttttaatagaacccaagactaccagcccaagaatggcaccacctgcaatgggccctctcacccttgatcactaattgagaaaatgccttacagctggatctcatggaggcatttcctcaagggaagctcctttctctgtgataactcctgtttgtgtcaatttgacacacaaaaccagccagtatggatgctacacttaaaaaacttgcttgacataagtcatcagtttatgtaagacctcttggttcaagcttttattttctctatcttttctattctcattctctctttctccctcttcatccctttcatgtaccatgaggtctgttagcatgtcttccattctcctgcttctagtctaggtcgccttttttctcccaagtcttccagaaaggaagagttacacatcttagaatctgcttgtcaacatcaacaaaagaaaagcttgtgggtatgtatatatgggattgtgttgcatctacagattaacttgaagacaaatgttatattaactattttgagatttttagccagaaaataatgagcatttatattctggtacagtttcagtttctttaaactaccttgtagctttgattggcagtccttctttcctttgcttcaatttctaaaaattataacacaaaaagtatctcttaagtttacactttaaaatcctattactttattatatcacactcaataaagttcaaattttctcctagtgataatggcatattaagagaaagttgcaaagaagcatgccaggtagtagtcccgagtatccctggccttgtcttcccactagtgttgtcctgcatgacgaaggtacagctcagtggcagggcattgactctggcacaccctgctgcacttgttcaagttccatcagctacacagattcatgtgtcacagaatgtgcacagttgtgacagttgtggacacagtgtagtcaggggaacagaacatttccatcactggaagatgtctggtgttgctgacttacacccacatcctcatactgtgtcctccagaagcacctaactggttcttcctgtaattttatttcaacacacaatataatacaaatggaagcacatcacttgacttttggagtgtgccagccaccatgcccaaccctggactatttcaaactgaatttaagaaagctgtttatgtattctagactctggtctgttatcaaatattattttgtaaatattttctccacctgcagttagtcttttcaacctcttaataatgtctcttccagagcaggatcttctgagtttgataagtctagttaactaactttctttctttcttttctttctttcctttctttccttcttcctttcttcctttctttctttctttctttctttctttctttctttctttctttctttctttctttctttctgaatgatgcttctgataccaagttaaaaatattcccctactcctaggcacaaaatgtttctcctatttttttcctaaaagcttagtagttttgaatattatattcaaatacaggatccattttgtgatgctaagcttggttttgctgttgttggaggctttgttgttgtttcttgtggtaaggttattgaaggttcatttgcttctccacagctagccaatggctctcgcactgcctgccatgggactgtgtttgcaccgttgtagaaacagctgagaacatttgtgctgattcatttgtggatgaacaccacagccctcctgactactacatgttcttgctttgtatcaacatataataaagctcattaacagaagagtaactcctctgactttattcttctttttaaattcattgtggctattctagcatcttcacatttctgcaacttaataaaacttgtctctgaccattaaaacatccttgtggaggttttagttggaactccattagacttagaagacttgacattgcctgtttcttcttctgatctgtgattttatatatacatatattaaactcttctttgttttcttatatcagtgtttaaagtgttgcctcctacagatatgtcatgtttaaatgcaagtattacaagtttacttagaccaaatataaattgaattccatctgctattcagctttgacttctatgctgttagcatacagaatactgtgtaattctctctctctctctctctctctctctctctctctctcgtgtgtgtgtgtgtgtgtgtgtgtgtgtgtgtgttctcttttttattttgtttgtttgtgtttgccttttggattgaataacctggctgaacttgctatttattctagaagctttttttggtcaactcctttggattttctgagtaaaaataatataatctacaaataattgtatctctttttttcctgtatgtattcttcttctatcttttgtacttattatgtgggttaggggttcctttgttgagtacttgtgaggaaagcaggccccttgctttttatatatatatatatttatttattatttatatgtaagtacactgtaggtgtcttcagacacaccagtagagggcgtcagatgtcattacggatggttgtaaaccatcatgtggttgctgggatttgaactcaggacctttggaagagcagtcagtgctcttatcccattctttctctattcatatgatgttagctttaggattttgtgggcatactttatgaagatgaagcagccaccctgtagcctttgttggagcatatgtgttcttttattttaaatgaatattgaattttgtcaaatgctttccctgaaccaagcaatctgatcacacataattattttggttagtttgttttttatatcagttgattttaggatgacatcccattgcttgtggtgcaccactcatttcatgtgttgctggattcaatttgctgagatactgatatatggaggtcttacatttttgtactgtctttgacagttatggcagcataacatgcgatagtaagcattatcgcttctgttttctggaggagactgtacatatttagtatcatatatttatgtataaagtaaaattcttcagtaaaacatacgtgcttgggaaatttctcttttggggttgagtgatttttgaattacactggaggggagtagggaaatgagataatgatcaggattcaaaagaaatgaggagaggtttccccttcccgtattcaatgtactgtaaggatacaggactttctagaaatccagaaatgcgggggaggttttgtgttaactacatggaaagtggtccaaacccaacccagaactcctcattgtcttggggatcctctccctatcagcactttcctggcttctgcgcactgcactcttccacctcagaggctcttggagctgaagagctttccaggaggtgactataaagtcggcagctgtggaaatgaggcagggtgatctgcactggagatatatggtggtgccaggtctgtggccacctcagctcttagcactacaaaagctcagaactgctaggtcgtgaattggttgcccccacagggctcaagctgatgacaggtccttctctcagaaacctaggcagggagaatgtgacgcccctagaactcagatggggaatggactctctcctcagcgaccagaagggcggggagcggatcctccctacagaactcaaacagaaagtgggtctacgtttgggcgtggagcagggagacagcacagattctggggagcgagaggattcaccccacagaacacctgggagtggggggtcacacttttgtcacacaactcaagcatctgcgagaacccgagctcaaagctgggagcctcaaggcccaggcaggacttctagccctttgccactttcatactataacttgtctaggatctaggcgcgctcctcgcccaaacaatctaagctcaagcaactagagcgtcgacaagcctaagctccgccccttccctctggccccgccccgtcccagttccggaatattttcttttttcgacaggcgccgcgaacactcagtggtgacgtcatggcagcgcgccgcggacgagctaggaccccgtcgcgttcatgtccctctggtccttgagccggcgcagacggcgaagtcatggccttgaggttgctgagactcgtcccggcgtcggctcccgcgcgcggcctcgcggccggagcccagcgcgtggtgagcggcgggtggctctccttgcttggatctcggcctgtcggctccgagccctgacgctccggcggcgtctgtcagacccgtgagccgcgagctcctgaggcctccgctcacagcaccggtgcagcgggactcactttcccggctgcatacggagagccgagatgccggagctccggagcctgggcccgcatgctcatcggttcagaaactgctttgtggaacgccttgtagactctggggtgacgtgatgtggagcagcaacagagatttggggtagattggggaggattaggaccttttagggtgcatgcagaataatgggtgacagtaggtgcttaggggaccgtggctggaaacaggacacgtcttatgacggcatcataacttctttgctttatagtagctagaactacataggtggtaaatcggaaaggggttgacagtcatgctaaggatttttattttgaacaggagtgatctgtgtgtgaaagaggtatagatgtgaaccagagagagacgaggtgtgtgtgaatgtgagcctggatcggcactgtcagcctaagccccactatgaattagcactgtcagcttaagcctattaggatcgcagtggagcacagcagcaagagcacagagcatattcacaatccactcttgaccttgaccctcagagaccacactccttcccctgtatcttcacatcaccctcttcagtgaagtcgtttcatatattcacatgtcggaagttcagtcacaccccgttccaccctaagcttttcatgcattgagttcattctttatgctgtgaagttttattgttttgcacaatgagcaatattatattttggactttacaatacacacagagtagttcacagccctaaaaaaaaaaaaatctattgtccttaatattcatttatttcccaccctgtcaactcctgacagccactgtgcttttgatgatttttgtcattttgcctatgctagactcgtgtaatcagtcacacatattacctgacacagtgctttctttttttacatagactttgacagttacacttagaatttatttgtggggctgcacagctgttaagagtacttgtttctcttttaacacacacacacacacacacacacacacagtacacaatctagacaatatttcttaagccagatgttgtggtgcacacctttaatcccaacatgagacaggcagatctatgaattctcggacagcctggtatacagggagttccagaccagccagggctacatagcaagactcttgtctcaaatccagcccccaaaaacagcaggggtgggggaagactcactgtgtctttatggcctttttagtcattccctttaattccatagtttggttatactgccatttatccatttacctattgaagatcatcttggtagtttccccataaggcaattgtgaaaaagctgatttaagtattcatgcaaagccgggcatggtggcacacacctttaatcccagcacttgggaggcagaggcaggtggatttctgagttcgaggccagcctggtctacagagtaagttcgaggacagccaggactacacagagaaaccctgtctcgaaaaaccaaaaaaaaaaaaaaaaaagtatgcatgcaaatttcttgtgggaatgtttcctatcattgggtgatgtgtttgctggtttgttagtgaggctgtagttttataaccatctgtcttctaccgaccatcccatttgcactccttagcagtacagagcatcctgctgtatgggtgctgacgtgggtgctggaagtcatttgcatttatgagcatccagtgagcatacacacacacacagcacatctcctggttcccaagggggcatcttaggcacctacatgctgcctgtgtgatctttgtaagatctgtttgcttattttaaaatttgctgccctttcaattattcacctttcaattatatatcctccactgtccccagcttggtgattttatttggggagagtggattattttagcttcagtttgaggagtagactgggagactgctgatgaggacgtcccttgcctgtggatgaggggtgtgaggaggaccttgcatccgtgcagcaggagagggagatgatgcttctccacagagcctgggcattcagcttctgtgggtgattacagaattaaagaaaggcaaaaatcatgcttatatagctctgtttgtggatagtggccagttcccactgttgcaggcatcattctcggcgctagagcatggaaactctacttaagcttaagttttctagctttctcgtgcttaaagtctcttggaggtaagggaattagtaacaggcagaaggtaaaagcctagatcagagagatactttattctgtcaggtccccctccctgctgctatttgtgcatatccatccttctgtccatctgttcatctgtctatccatccatccagttttcattaacataacaagcatccttgtttcttagtctgttctgagacctaaggaggtgaacagccagttctcagagagctcacaccgaggaagaagggagtcaggtcattaaacaagaggtgcctcttagtgttttatataatagctgctaatgcctgcagtaaccacagtggtgatgtgctgttgtgtttttcagggacgaattcataccagtgtgcactgcaagctgaggtatgggcttttggccgccattcttggtgataagacaaccaaaaagctgcatgagtacagccgagtgataacagtagatgggaacatatgctctgggaaaaacaagctcgcaaaggagatcgcacagcaactaggtatgcaccgggcagagtggccctggcctgtcaggcatgtggctgcttatcccagctagaatttgcttggctattgactaggtagatttaggcctaaggtaggtcttttatatttttaattgcttgttgagtatatgcttataatcttagtgtttacgaggctacagcaagaggattgccatgagattgaggcaagcttgagctatgtagtgagtactcggccaaccatagcttcatggggagaccctgtctcagatcaaatcagagagaggtgttaatctttcaaagggaacattaaaaacatccctggcagttaccagttggaataggactttacctgggagtgcggcagagtccttttctgagctgccctgccagaggagctgtcactacattggctctcacgtggggtgatgggacataggctggcctcttcagttcctcatgcagccatctgcctgcttgcctttgggaatattggactgcagcagtggggtgagggttggaaggggtgtgctgatctacttggttgtagagaatggagaagcatgttctttagctgttgtccacagcatagaatgtgcttcttgagtatgtgatgaagtgtgggctcaaaggggactttcccttgggttctgatgaccagccctgacaataacattcaagttttctttgggtttctgtccaagcacacacttgcagtaggagtgagtggtcatccaggtcttctccctataggcatgaagcactacccagaagcagggatacagtactcaagcaccaccacaggcgatggaaggcccctcgacatagagtttagtggcagctgtagtttagagaaattttatgatgatcccaagagcaacgatggcaacagctaccgcctgcagtcctggctgtatgccagccgccttcttcagtatgcagatgccctggagcacctgctgagcacaggtatggctgtgtccttggtcgggggtggagggcatgctccttgatggttttctgaggagagggttttctgaataggtacttttaggtaagttctgtgtttccagtaagattgtaagtcctcaaaatccctgtagatgcaggctcaaaatagtgtagccttattgttgctgcccacgacagggagctctgcagcttgttgacggtatgacactgtatttggaggacagcatacagatgactgggaaaatgtgaagtcacagtcatgaggatggactacatgtcccatggagagagacatggatgacagccaatgggttttctggagggacagtggtcagtttaaaagttaaaccttaaaaaggtagcagaggtggggatcctggtgcccattcagttaaaagaaactgtccccagatgttatctaagtaaacgtttgagcaagcaatgtgtagaatggaagactggcagcagggaccaggaagcagttaggacgtgagaggagagcagatgatagaaccggagtgtatagataaggtcagaatacagcccttcctgccctgaacccagaatgccctgaaaatgaacagcagacatcttgctgaacctgtagccaaagctgtgtaccaggaactgtattcacagtggtatgttgtggggagggggaaaggatgtggtcgttatttaaggctgtgtctaccccttagagcagtggctaccctgtggttgatgagtgaattgtgtgggagaaggggtagctgtcgtgtaaagctgtgtctacttcgtatgaccacccatgattgatggacagattgtgtgagaaagaccgggtagcttatatttaaggttgtgtctacttcctgtagcagtggtttccttgtggttgatggtgggtttagaaacaagttcagctaggaagttcaacccctaggaagttggctcagtgattctgagctgtgagaacaagaatgtgttttcagcaaggcctcaagatagctgataaagctgcttcccaaactcgaatttgggacccattgcctgggactctgggttcctgagcacacggtgtgtgtccacagaccccaagtcatgctgaagtgtctggttttgatgttccaattgtattaatgagtatttcctttcatggatggaagctctggtcttagtgttattgctagaaacctatgtggtctggagtctccctcttgggagctgctctggggagctggtcctaggtgaagttacagaacaaccagttttctctctgggtgagtggtgcctcggggccaattctcctgagggaaaagttctgcctgagcctcgcagggtagatcgcagggacttttaaagatcttgagtggttatattgtatggagctggtgatgctggtaataaaggcgagaagttaccagctgagagttttaaacttggaagtctttactctgaaggagaaaggaggtttgagtacaactttatcaggctgaagtgtcctgctgctgagaaggaaggatcaagatataatggcgagatggtgtcttctgtgagcctccagtttgccttctcaccgagtacgatgggagcattcatctttggcttcttcagcacgaccacctcaaagacaggagtatccccggggagctgtgtgtctcttagatcatgctaaaagatgtagaagacactggacctagagaaagaagtgatctgagattgttacctgactgctggtctagaaagcatatttggagtataaagcagttctctgtcaacagaacaatgctctgaaccagggtgttatttgggatgtgattgttttgaggctgtaatctaaagctgctgttgaaagagaacaaatagttttctttaatgatagagatggtctcaagagaaaaaggaatggtgcattggcctcttggtacagcgttgtaccaaatgttgcaatgccacttcttgtgacaagcccatgagtttgtcccatttccagacacatgagataactaagagttatgaaattatcctgaacttgaaacatttgtatattaattctttatattcagatgcttgagaggccctgatggctgtgaggagtagggcgtggattggaggaggaggccaggattggagaggtcccagtgatcctcaaggatctgatagagacccatagtcctctctgccacaggtgatggagaagacagagttaccccagaccaaaagagcactatggtttaaagggctttccatttgtagatagtgtggtctttgaatgtatgtggtaagaactggaattgtaagtcacagtcatttttgttgttcttggctttccatttctaaaatgaaatttctagttagaggtactttttaatctgtttggttcatattttttgtttacctgttttgacaggacaaggtgtggtcttggagcgctccatctacagtgactttgtcttcctggaggcaatgtacaaccagggctatatccgaaagcagtgtaagttgtttaatatacccctggtgtgcatgtgcctctgctgatgggtatgcctccgcaggggatgaggggagggtattttgaattaaataagtgctgtggtgtaccatattccccaggttaggagggggctcactaagttcccattgtcttcttcatcctaaatagctatcttttgtccctccacttaccctgtaagcaaagtggcatccttggtgctcaggaatactcaggccacagctcctgcagccattccctaggagacccatgaccctcagttcagtcctatagcctcactagtttcccgtggtctgtgtaactaattgtgctgaactctccagtttccagcatatgggtttatagatttgggttgttctactttcccctctgtccctgcacagttgccagtgtccttgcttccctccagttgatgaccctattttaggaacattggtgttggttacatcaatggcagataacaaaggaggaagaataaaaggctgttggttaaagtaggctggctgggaaccccagagaggctggtgtatctgtaaagagtttgcgcatgctgtgcttggcctgcatcggtttcagtgtcaggttcttgctgtgtgcttgatggctgcagcagtgggcactgaaagctggaggtcagtgtaaatgtgtttgatcagggaaactgaggcaagcaaaggaatgattgcaacctgaggctctggctctggccctgctgtttccttttgggtggctagagggcatgcacctgtgtatgggggcaggaagagtgggcagaaacatgctgctactgccggaggggaagcctgcccgccctacacatgccaagcagcagttgaggttggtcaacggggatttctgaggcactgtgagcacagttctggctggatgcgcaggcacaccaagcaaggctttgctgtcctagggaagggaccttaaggcaacagaaataaggagtggcggaacagcatgcctggcacccacccctcagctgatccagagtgctgtagaggagcaccctgcaatccagctcatgtggcaggggtgggagtcatggccagggacagctcctgtggtaactggccttcagggattatccatcgagtacaggaaggagtgaggacggctgaatcgtcagcattaggcgagtgctgtggtagaagaggggctgggggctggccagtgtggtgttggagtggcagtcagggcatggacaagcaaagactggcaccttattagggcgggaagctcggataccttctggaaggaccgagggaccactgagcatgtaggtgtgagaaggaagatttgataggtgatcacaggaatgtctgaagagaacatgtgtggtgagggaaagtccaagggaaggaggccggttgggaggaagtgggaagggaacaggtggcctagattggaggacactggtagcaggagctatctactcctgaagctaacgttgacaagcagggaagagtggtcactcttgcagaagcaccagaagcacagcaggagtgtaatggaagaccaccttctagaatgaagaggaatcagtgggctgcatggtggcttctcttggctaatcttgaatgtgagactctctgagatgggctcaagatacacctacagattcctgctgctaaggcctgaggaatagatgtcagcagtgacagtgagcctgctttgactcgataatgcccatgagtgataacagagaggcagccaggtcctgggtacaattctgaggaggcagaaaccccaagggtaacactccatggcttcgtgtgcacacggagagctgaagggagggagggaggggttggccgtgccacgaatgctgtagccggtggccgttggagttcacctgtgtagggttagtgactgtagtcagtcatgttagtaccagaatagggaaaagcacattagctaatgtctggcatccagggaggcaaaaatggcctaaggaatgagatgttggcataaataagtagacaaatggagatggaacagaggaagcaagcagagggccagggctagtacattgccagtctagcaagcagggcaacgcatagctttctccttgtgtaggtgtggtcagggcagttggggcaggtgccctagcccatgggcatgcctcctccatcacactcttcctgttcccgcttggttctccttagtcttgatcacagagcagtccaagatagccttcaacacagtgacctcgagggtcactggaatgtttggaagtgaagtgtctttccatgggcttagtgcaagcacccacatgtcacttctggatgatttgctgtggaaacagtgtttctcaacactgcgtagaggtgcccaagtgtggatatcccactgtggacctagtgccttctccctattggggctagtgtgggtaggttgtgtgtgatgactctgggttgttgttctttctaataacaagagtgatcatcaggactgtggtgtctgtgttgggtgctgaggtgagatgactatggcaggctcagtgctctgcttcatttctgtgtaaatctgattcactagatgcttacatcaaagtctctgagatattctgaaccagggaagagtggcctacgtttccacctgaatctgaaatacttagagctccctacagagcagagtctcatatgtgtactgtaaggaaacagatacacatatctggctctattatgcatcccaactcaagaaacatatgaggagaatgcaggtgtgcctccagcttgcccaggaaatgaggtagacacacacaaggtctgtcctgtgggcagtggttaggttaagtcttggtatagatcctcatgtgccaggagaagcctagagccgtctggactctgatggtgatgggctctcttgtaggtgtggaccactataatgaaattaagcggctcactctcccggagtacctgccaccacacgcagtcatctatatcgatgtgcccgtgccggaggtacagagcaggatccagaagaaaggagatgtaagtcattacccataagagccaggtgtctacatgttcttgtgatcagcatgggccaggtgccaggtcagcacacatgtgcaggagatcccaaccatgaacacacatctgtccctgagtcatcttatggggagacagagcgagcaccccatctaccctgcctggacccttctcttctcagagtctcatatcctctggcttggaaatgaaagtgatttggatgtccttcacatgtcctgattctatagagagccatgtgctccgtatccagctgcccttttggttgacactctgagagattaatagatgctggtcatggggaagacatggcctttgcatgctgtggtggagatagagattgctgcagtgagcttaaagtggccatcccagtgctgtgtcctcgcaggggctcaggggcatcattcctagtgcaggcgtcaagtggtttttaaaacatgtattgattactattattatatgtactaccatgtattgtaaactgtcaagatgtacatgtatcccagcacacacacagaagtgtgaggaccactttgtgacattctttcttcccctttcacatgggttccagagattggtcccaggtgtctaggctgtgtggtgagcatccttaactcactgagccatcttgcttaccctctaggtgaaccagctcttccctgccctgacaaggacaagtgaaccattttgtttgtgcatgtccctcaggctgcgtaagagctcactctaagttgatgaataactcaggacttgccatggaattacagagggaactgcaaatatttaatctcctttgtaaaataactttcagcaaaattgtttatagaagtcagtgagaaacccaagtcatattccatagctgtaggaagaaattttgttaagctagataacatatttgaaatgtttcaaatacttgtgagtccaaatttaagctgtcacctatgtgttttctaagtcaagtcttagtctcaccaacacaaaaacagttgctttataaaagggggatggggtggtcatggcacaggttccactgtagtcaggaatcattctcactgcctgtcccctgaagctggtagctctttagaagaagtacctccaattgtggtcacatttcgcatacatacatacaatttttaaaaaataagtctgaacacctcctgggatgttttctctgcttttgtttagccacatgaaatgaaggtcacctctgcctatctccaggacatcgagaatgcgtacaagaaaaccttcctccccaaaatgaggtgagcccagcccagcactcccgtgtaagacagattgccttgcagaggctggagccacacagcccagagtgctttctctccactcacagcctcacgctgcagagccaacgggagccttttcaatccaggttttgtatatttgtttgggtaggctttttgggttttttggttttgtttttaatttttcctctcctgttaggtccttaaaattcttgatgctaaaaataaatctatgctcaagtccatggcaaatctcagcactaaaggtcctatgtattctattcaggtagtaggtagatatctagaaaaaacactcagcatggctgaagaggaagtgcatgaatacacagccccatggtcctttgaggggcgggcattcttcagcgaagttagggccagcaccaccagctgggttgtcttctatccctgatatgttgaagcatgggggaagtgtgctctcctagctccatgtggctctctggtccttggcatattgtgtataacagattgtttgatactgaaaatcttcagggtacgtaaaactacgaataaaaacaaaatgacatgagtgatctttgccttccacagtcacactgtagtggcatgaattccaggacactctggtcccagatggtgggggacgcttatgtcagagcaaggggctctggtggctgttgggcatttgcatagacctggaaatgctgaccatgtgcctttaattctgtcttacagtgaaatgtgtgaggtgttggtgtacgattcctgggaagctgaagacccaaccaaggtggggcgatgccagccagcggcagacgctcttcagcttgatgctcagggttccccagaccacctgacgaggttgattcccgctagtttagagcattggcatgtcacagtcaaatggcaaaatccacccaacactccctgctcgtcagctgccctgagctgtgaagcttttgactcttcaaaaaatagcttcgtgtgtgtgatcttaaaatcaaatgcagagatgcagaattaaatgtaaagatgcagaatgccttgggacttgtgtcaaaaaacatgacagaaccttgccttagttcagaggaaaagttaactaacttaaagagaactgttttccttaagtctgcattttgtgaaattccagttaataactgcattttatgaaatcccagttagtcttgatggagttttcaaggaacttaatgagtaacaaccaagaaaattctgaaaaggagtaattcaggacatctgctctcccaagtacagaagtgtatgcatagtaaggagaagattgggttgttagtacaagaataacggatcatccagttggtgagtttgctttggttcgccagaccccaggaacagcacagaaagactctcttagtttggcagagttccttcaagataataaaaatcaaaaagtgaaataagaggggaaaagtaatttcttaaatggtattagggtaaatggatatccatttggtgaaaaaaacaaacaagttcgaggccagcctgaactacatagtaaagtcaagaccagcttgggctgcgtaataagaccctgttaacaacaacagaaactaacactgcccccaccccgagcctggagttctgccttatattgcattgtatattcattgtatctaaagcttcaattaccagcagacaagcctggcctagtgaggcttgtttgtaatgccagcacttgagaagcagaggcaggaagattattgtaagtgtgaggcagcctggtctatatagtgagttccaggctagccagggctgcatggcaaaacccagtctcagacagacgtgaaggccaggaaagggttagtgaacaacccttaggagcatacaagtgctagctcagacgcctcagacctgcagaaggatcttgcagagctgatggctgtgagccacctgcatgctcagcccttctgtacagaggacaggagagaggggacctggtgagttctaccagggaacagcattctgctctcagaaggaagttgtgtttagtgtggctctgctgcctcctgtaagcattcttttgagttcctggcttgacctgcttggactggaaagctggtttcactaccttcctggatcaacaccaagttgttcaccttcagtttatttttgtaccttttgactggtgtttagatattatgtttagatagtatatcttagttatgaaccgctgacctttaagtgaggtccgagctgggcatgttccggaacagcagtgagcatgagaagattgcctctctgaagggcaggaatagaggcctgggctctccaggaatatgttggtgttcaggctcctctgcttctctgtgtggctgccttcccttgcagaaggaagtagtttaggaagatatgggtactctccttaattggctttcctctcatcatcagggcgacttctgtccccttgctctttcagaatgttgagggggcagggtcatgctgaacccactgaagtcctgccatttgttcttcttgacttgtatgtcttcttggtttgtatgatctgccaggactgtgtaaacgtgcagtgttgccgaattcacaattcttagctggagttgtttctgttgctttaggtggtagaggacattgaataccttaagtacaacaaagggccttggctgaaacaggacgactggacctttcactacctgcggatgctgtgagtcactgggcgaacttctggggtgggaacagactactccttggtgaacactgcaggggtctgctgcatgctgtagaagtggacagttttttaaataattaatacttagttgtcaactgcaccagccaggactgcggtctttaccctttttccttctgagcaactcgctgtacatagtaatttgttgttattaattgcgtcattattttgcttctactctgtgccaggattggttttagtttgaaagactttaagatcaaataaaatgtctgctctcagcagaggcacattttagtgggagatgcaagcaaactagggcccagaactattgagttataaaggccactcccaagtctgactcctgggaagcttcagacacagggctgagtcctgcttcctcagcctttccatgcaaaggccgatataccttggtcactcagcccctgccactcacttccttccctccagttaagactgctgggagtatcttcctgccacattcacagcaaggaacaaactacttcgacaaaatagcctcagggaaggaactttgagtttcagaggaaacaggcttcccatttttctgtttatccctgtgtctgtaagcaagcttgcagccctctgatggtacctggttgcatcctgagcagatacacttacacagggcacacaggtagagttggatgccttgtatttccatagaggatatgctagatctttaaagggacttcagagatgcagttgtaccagcaggttacttcattgagaataagaattgttactgggtcagactgtacagataaataacattttacaactactgatttttttttcttttttggtaagattattctgtagaaattattggtattgaatattttatctgtaaagaagcacagttagggttgagagataacctagttaactagtaagagacctgagtagactccaggcacacccataagaatctagatttagttgtgcatgcttgtgtggaggcagagggggtccctggggcctgctgatcagtcagacagccaaattctttcagtaagaaaccctgcctcaaacattaagactaaaagagaatgaggaagactcagaattactctctggcctctgtacacattagagacacaaacatacacacatgcacttgcacacacacaggaacatgaatgtatacacgtggatacacaatgatgcagtataattaaataaaaatcaacagaaacctgttaatttgttcagagaagagtcgctttggcatgcagtttctaaattcagttacgttcctcctggttgctttgtgctgtgagtccttttcctgctggtgactttcaaagagccaggtgttggctgttcatcgaggctttgttttcagtgatggtttttactcttcctcctgcttccttagatctcagctgctctcttcagcatcccagggtagacagctgacttagaccctctttcctaacaaagcccaggttcactcagtttcactaaggaaaatattttcagaattctgttgagactttccttgtctcacatatgatttaggagtgtgttgtttcgtgtcgtatctggggttttacacctatcattcttcccccacccccaaaccccactgtgatctgcaaacattctgctatttctctcctttcacctccattcaggtgtctttctgggtggcatgtcttttgccttggcacatgctctattgagcagacagtgtgggttctgctatgggaacgctgagcctgcctgtcatggagccgaggcctgtggtgactgggtcatctgtgccctctgtaggatctgtcagttctgaaaggggcttaaagttcaagcaatgcccgttctctggggtctctctctccatcgagtcttgtttatttttgccttgtgtttcaattgttgttgttaaatacatcttctaattagagaatgctcatctgcatatgcctgctgttttcttttgttctgaaatttcctctgtctgaaatattatattaacatttacagtaatattaacttttgctctcagcagaggcatggtgtcttgtccattcttttacttttattatcctaattttaagtcatttttctacacagcgagtagttacgtcttttttttcatattgtcttgacagttgtatcttctatacttggatctttaacattaaaatgagcagtactattagaatccatttctcttgtgctttctatttagtacattgtttcctttccccatctctgaatttaactgatcatttaatatattctgctttgtatcagcatttcatactttagaaaaaaactacatttcagttgctgtgttttcctgtaattcctagctcatctgtgtccagtgccattccacaggagggcaggtggctgacagcatggtgcactctcagtcccttacagcattgctggcattgttccactctactgcaagatatgatctcttagtatattgtaactgtcatctaagaaatgtgcagttagcctgctttagccacaacattggccaagtttgttgttgttgtttgtttgtttgtttgtttgtttgtttgaatattgtggttgttctgagtatgtggagatttttccttctcagtattctttgagcattgtagtgactgctgtgtccaccgtgagaattactgaaagtgtgtggctggaaacatggaggctgtgtgacagtcagtactgtgctttttatgtccttagagtttgctctccacagggtctctgaaagcaaccctgtggataccatgggatacctattactgcttgaaatggagtcatacattctgttcccttgaataggtagggctgtgtgtgtgtgtgtgtgtgtgtgtgtgtgtatgtgtgtgtgtgtatgtgaaaaagagagagattgagattgatttattggattgatttataggttgctgttgtgataatccagcaatagctatttgacactattctctctaatccctatctggtgctgagggcctggaggattcctagagtcttttttttttttaatttatttatttattttatgtatatgggtacactgtagctgaacagttgtaagtcttcatgtggttgttgggaattgaatttttaggatctctgcttgctcaggcccaaagatttatttattatacataagtacactgtagctgtcttcagaagagggcatcagatctcatgacgggtggttgtgagccaccatgtggttgctgggatttgaactcaggaccttcggaagagcagtcagtgttcttagccactgagccatctctccagccccaatcccagagtcttaagtgtacattagagtcccaaagaagttggttctaatattggtgcatgaatgctgcaacaacaggatagatggacttgccagcaagaatgaagacaagcaggcaggaagcatttgcctcattctgtagccctgaccatccagccaaaatatagtctccagctcataaatcaatattcagccaatcacacatctggctatttcatctttcaaataaaatgtatagccaggtaccctgcccatagtggtgctcactgtgaagatttccctacactccagggttctccagaaggtagtatgtgctttgaatcagcattcagtatatggtgctgcttccatagccagtctaggtatcaggaagtggaaggaatgattccattcactgttcccctagaatccagtaagaaaaattgtgcttcctgattctatggcgttctaccctgctgtcctagaggttttagtactagagagtggggtgttgctgtgaagaatctggccatgttttatttatttgttttgttttaaggtatgtggaaggctttgatgttttagattagtaaagtagctgcattttgtaagcagaacataatgggctcttgtagtaggaacttgaaagtcagtagcactgaggctcatactcacgcatggactttaccaacagctaggctgtgataccttggctaggaatctggctgccttctgcccttgtcctgagaacttgcctgatgctaattaagtaatagactaatctctttggcagaggaaatttcaagagagtatagcattgagtctgtggttaggttattattgataacccgtatatagttctacactgaaaaagagcaaatggaacagaaagaaataacaacatatataacctggaggaaaataaaagcactaggaagtttaatgtttacagccaaggcatctctgtcaagagaggctttaattgtttaaatagattagttaaggccagtccacattggactgtccctcattggagggtaagatgcccaggaaacaagacctcatacagctaagcttctaccttatgaggaagcttcaacataccgatgtggtcaaaggcaaagagggcccatcccaagctagctgctgatcttggcatgttatctaaatggtattggccctagaggcgtgaaatacacaagaattgaggagtcaggaattcttccgtagtttcagggagctatgagtccaggaagtgtgtggcagaggagtcctgcatgaaggacagccctaagaggacaggaagccatataagattgctgcatgaagatgagaaaatgaagggtggtttgcagtggaaagcccagatggtggagatgctgtgagatgtctgtcaggaagtggagctgctgcagcactctgagcctgtctgtgcctgtcttgccctgctctgtcatgtgcttgggatagagtctgaggctgttgggcccctccatttatgctaaccctcacttctccccaaagactactctgaaggctgatgtactactctgttgtggtttctcttctgatcctgttgttctctgctggagtggtttggtgccttcattttggatctctgcttctggtcagttcctaactgccctcactgttttccaatacacctccagaggttcgtctgttttgtttacttgtttttaggttaagagagttcctgtttcctctttatgaagagtgctctcaagcactaacatttctgttcctggattagctcagaaactgcaacctctgtcctgctctagcacctggtgacctgaatcccagtgttgaactttatattcttcacagcctgcaaggttattactgtcttgttatcaccatgacacctcctcttaatgccctgagtctgttacacaaatgtcttgtgatccttgctttttagaatcagttaactgggcagagtgtatgagctagcattagggcacgaggactaagatccaaacagactcactgcgactagggagtatttctggcttttgacctcccacagataataccatatcattttctaaatttgatctgaaacacatgttgatctgacccgtgcttaaaattcataattttggtattacttagttatatggttatcagggtatagagctgtgacctgtaattttcccagagtttgtgagttacaacatccaattaattgcttgtatttcatttactgtggctttgtcctttccctgtgttgtgccctctcctcagtttcataagttttcaatggtaattgtgctgatcttaatttcttgagtgaaaattatgatctgtttctgagacaattgctgtaaacatgccacttgccagttagacttatttggtccagacttgaccaaattatcgttttagaacatttctgtttaatttcagctacatttcagtgcaccccccacccccacccccatacccaccctcccagccccacctactgcccatgaggctcattgcagctgctggaagtttccagacagagatctagtactgtggtgatggatgcaagttctccacagggtttcaggcagaactacagttcaggaggaagtaaaaacagcctgtggaaagtgggagaaaagtggcctctctcctatgggagaaatattcagccatagaaccttaattgctgttctgtacttttctgttgtcgtgcctcagtgcctctggttaaagccgtctgcccatggcactaatcagcctgtgacacttcgtcacatcatagttggacactggtgtggcaggaacattgttctcagatgggtttctccatctgtagcgttgaaatgtgtttattgcgtaagcatagctccttatcagctttgtgttctgaatcatagaggcttcccagtgcctttagttcttcattatctctgatcaaggatgttatctctagcctatctgacaagtatttaccggagatgtgctgtgtctctcttcatcctgtgagctctgctaagagttgtttctccaggtttaagtaaggtacacaacagagtacttttaaagccttcttgttctttttctggggcatgtgtaaattgtaattctggcaaatcatacatagatggcgctgttgttctatagttcacatacttccaggacaccctcctttgatatttgttaacatttaaggtgtacttcatttttagttgaaatattttgttaccacttcaacagaattaacagtagcaggtacagaataatcctgtgttacagtagagagctgtgtgtgtatgctgctagcaagtcatgaagagcacgagaaggttgtcaacttgttgctgtagagagggagtgctcaaaagtagtgctgaggccaggccttggctctgtggaatttcatgtaacagctaatcagagcaagcttacagagcagggctaatgtgtcctctacagactctactgtttgtatgcttgaactgtttttaaatgttttcatttcttttggcagaaaaaaaccaactggataggatatgaaagctaagaaaagcaatcttaatctttgacagtgtctatctagtatgggcactcacctaaaccagtgcaaaccacgcaggaggacgggcaggcagggctacccgaacaactgtgcttgggggatttgaatcgctcgatcattgtgggagtggcgcatttgcactaggacattcctgccaccaactaagttcagccttaccacagtcatcatttctctgtgatttcttgtggaagcaagcgtgacccacggacccatgcaccatgcattcctcttaggttctagttctgtggggacctggctgtcgcctacgggtttatatagtgagccatctagccaccaggaaccagatacagttatagaatctacacttggaaattgcagacaagaaacatcctctcttgcctttacaacttaggtatagctaagaatttgttgaaaataattactttgtttcttgagcctgtaagattaagaaaggctttagtgccttttcccctcagacatttgtctccccaggtagcccaggctggactcaaacttgtggcagttcctttgccttagcttcccaagtactagggtgtctagcgcatgactatgcccagatttaatttttaaaaaaagaaaaaaatggggaaaaaaaaggtttgtctcttcaagcatagtgcttatgttgaacccatctttgaagagaatgggatgtaacagttgtataaacgttcttgaatcagcagaatgaaatggtaaagcaagggagaagcctacagttggtattagtagtaccagaaatgaatctacccttgataaatatggcccagtgtgctacctagcaagttccatgtggtactgtcacttggctttctaatgagggcatagtgtgcataacgtggggactaccatctgctggtagattactcctgctattgtgtgtgaagtacacattggctccatttttccatttcccaaacccttcatcgagagcccactatctgaaggtatcagggcttctcagaactccctcagttctggagctgtttagcagagtggctacatgaccccagagatctttaagagaagtggtgccttgaacatgcctgcttgtgaacagcacttagttagtagtagtggtgttgttgttgttttggggttttttgtttgttttgggttttttttaaagatttatttatttttatgtgcattggtgttttgcctgcatatatgtcttgcgagggtgacagatcccctggaactggagttatagacagtggtgagctgctgtgcagttgctgggagttgaagccagattctcttagcatccagtgcttctaattgctgagccatctccccagtccctgtagatacatgaagagttaagaatatttgtctaatggtacttattttgatggcttgttgtaatccatgtttgtcttacttttcagggttcaggataagacagaagtgctgaattacacgaccattccggtctacctcccagaaatcactattggagctcatcagggtagccggatctacaacagcttcagagaggtgagccctactatgggagcaaagtcagggatacatgtgaccactaagccacctccgtgaagagtggatcagctgctgtccccctcatttctagtgataaagcaccggatccagtgtcctttctaggtacattgtcttgttggacacatatcctccattcactagctgatggctctagttcttcacagctacatccagtgtcaccttactcctcacagtgtatctctgaggtttccatttgtgaggccttacatttgtatgtttgtgaggccttacatttgtatgtttgtgaggccttacatttgtacattgcagcaacggtgccggactgatgcacacatggaaatagcatctctccctcctcgtgactttctctagtttatacatcttcttcacaagtcttttgttcctccattgctatttctagctgtgtaggcagggtcagggacctaacaagaccagtagcctgcaccaagtagcatcatggaataggaagagtgtcctctgtccgtcatctgctgtagcatgttggttcttggaaagtgtggaacacatgggtctgcatccggagacagctgcctgcactcctgtcagcagcagcagaggctacagaccactgagctttgattaaggggttcaatgtggctgttccccctcctccctcccttacttgaaggactcaacattttcttttaaacaagttctttgagcctttttgaaaataattgtattcaccatatacatttgggagctatctcctgaccatggtctgtgtctggactgacatcttacctgagtggatacagctgctccctatggccgccaggtcccacactccctacctccctctgccagctgcagaaggatggtctacagcattgtggacctgcctccctctgtcagcgttggcctcactgatagtgggtgtgtggttggcgaggtggatagtactttccatcttgtgcctttgacattactgcctgtacccatatcaacagagcttgccttcaagtttcttctcaggaatgttgctccagcaccttagactgtcttcagctaatatttgcccaggatttattttctgttccctttcacgtcagcctttctctggttatctgaaggtattaaaacaaacaaacaaaaccctctagttattctgagtgtttgtaatatttatccagttacattggaaaaagtacttacctgggctgtctcatggtgttttctgacctgtcctgtgtattttacttttgggggattatggtttttttctggctttcatgtatgtcctcctgcttgccaactagtcatcgttctgttactagttggccactgtagtgattaacctggtaatgaaaatggtcatctctgatatatttgagtctaatgtcagtagttttcctgttgcaggcaacgtaaagtcacagactgttgagctctgtttgcttaactcctcccgtggactgctgtgataatgggtcctaattctccatacttctaagtccctcaagttattatggggactgtggggacagtattgactcaagatagggaaggcaccctaacacttaccctgctgagccttaatctgtgatagagcaatctgataactgcagtgtatgtcttttgggtctgcttggatggcctggctcccttctgctgtttggtcatctccctgtgccccctggcaggtgctccctgtgttttgtctcacatcttctctcactatgcctgatatttgccacttttgatagtattttattaagaataaatattaaataataataaagtattttattaaggagatctctagtcaggatcaaagtgaaagtaggccatcagaatccattctaatatcaagctgatgggctggctgtgtgtgggttccatgaggtctgatgtatttccagtcttcctgcttttctcgagatttcatccctactgtgtgcagaagctctgtttggtgcctctctgctgctgctcctgagacttagggataccccagaaggctgatgtgctgactgtaagcccaccttctccatacactaacaccataaaacacagccgctgcctgccttgattcctgtgagtggagagctttatgtgccatctgtcgcggcttatatgggagggcagagttggtttgagccagctagtgagccacacatagggaagtggttttatggtgagcctgacaccatcaccatcattgtgtgtttaaggctttctgtgttctaataatcttctagatggtgtcttgtcaacttgacacaagctttgggaagaaggaatctcgactgaaaaatgagcctaccagaatgctggttgggcaagcctgtggagcattttcttgattaacgattaatatggaagggcccagcccactgtgagtggtactacccctaggcaggtggtcctggatggtgtaagagagcaggctgagcaagccatggggagcaagccagtcagcaagattccatttcctatgtttctgttcctgccctgacttcccccaatgatggacataaactgtaagatgaaataaactcctccctcctcaagttgcttttggtcatagtgttttatcagagcagtagagaccttaatactgaatatcaaagagagtccatggcactggacatttggatttaattaaagatagaaaggatagagattttaaacaaataattggaggaatctttttttctttttaatttctgagtgttttttgaaaaacaagtttagttactcaagaagttttatatgtataggatgctgtgaggctggcggaggtctcccgtactttcatagggtttccatatcaccagctttcagttcatactaagcatggactctgggtgctaactgagctgtcacctagatctccttagcatgtcacttctgggccaggacctcacccagacctcttggcacaaactatctgtgcaggctcctcggcagtgatgtgcatccccgactcttagtcacagtgtagagacttgcagcacagtcccgagtgggcatcagtgagggagggaatggtcagcattgctttgaggaccctaactctggttgcctgcagcctttctttgcagagctgctctgtctctttctttcagaagtactgtgcattcttcaggcttcctctttgttgactaagaactgtgtgaccatttagaggaatgttagctttgtttatttgttgtttaaggaaactgagttgctttcattttaaagaatggcttgaaatgatgcatggcagtaagtaaaatgactttcttcccagggacaggattttcttggctattaaagacagcaacaattatcacaaaatttcccactggaaatttctttgtggatgattcagagatgagtgtgtgaggcccttcagtccgtttcctaccagctattgacagcctgggaatctgtggctttcaccaaggcactccctgggaagcagaactgttggccagccactgtgctcaaacctcagacaactctgacttagtgatctgcttacactcactggcaagctctgctgtcattgctgtttgggagccagcactgcctcacgccactcctgggaagtacaggaatgtcagcagccagctagtgggtccaccccagcacttctgacaaggatgtcaggacacttcatgtcgtgagtaacaaagagaaggagcaaactggctgtatgagatggtggtgcaggagctgtgcaccttgggtactctggaaaggtcaaggagggacactcaggatgcttctaatgactgcgtgggggctgcagtgaaccatgacgaagtgttgttaaagacaagagtttatgtgaatggataggcaaaggtgaatgtcactggcagtgggaagaggagtcacaggagacttaggcagaggacagaactgggactacggcaggggtcagcaggtggccggaccacactacacagactggggctgtggggtttagactgtcactgccatttcagaagactttctagtatttgcttttttgtagctgcaactaaatacttgacaagaacaatatgggaagaataacttatttcctgggagactcacgggtgggcagtccatccaggcaaggcagacgaggtaggtagttaagaggaagttaagaagctgaggacggagggaaaacagacttgcctatagtggtcactgcttcctgcttccccagcacctacttttcaccacctcccaagcatcctggcatcctacatgtccatccagggatgcagccactcatagtcagaggcctcctgctctcattgtctctgacaacacaggcaccccagaggtcgttcccaatccagactcattatcacacatccaccctctggcctggcacccaaatgctctaaacgtccattatgctcaggcctctgtccatacgtgcttaccagtgctactttcatcgcttaattctgcatgatgccacaggtctggtgatagaggctgtctctgcactcatggcctctgcatttgtccctagcaaagcctttggcatctgttagcagctgccttcagaggggccttgtcaggtggtaggtctcgctgtgggagcaagggttcagatctatcaccattgtgtatgcacctgaagtcggtaacttccagaatctgtcagtagccaatagttcagcagggctgggtggggccccatgagtccctccgctatccatggttgactgctggcaggcctactcttgtaagcacagttcaggcaaccacagctctcatgagagcatgcttccacttatgccctgaagatagcatgttgcagcccttttcctttcttcctacttttatattctttgagttccctcttccatgatgctgtctaattaagccttagaggaggtatataaatatcctttgagggatgagcacttagctatcacttattcttagcaccttgaacagacatgagtctctgcattcattgttagtcactcccagagaagcttctctgagtcaatagtggcatttatctgtgagtataagccttaagtatttagagagcagtttagtgtccggtcagacaacagtagtcagttccttctaaggccaatagtgtcccagccataaatttgggagcaaaggggtgtgtgtgtgtgtgtgtgtgtgtgtgtgtgtgtacactcatgtgttacctcctatggagtaggcatgaaatctattccaagagttgtaggttacttataatagtagtgccactattgcacttgtaagcacaccttgtctcacaagttgtgtttatagttgttgggttcacagctggtaagagctcaggccttttctcaccctttagcctgtacagcaccttctcgctgtgaaagccatccagcagggaagaagctactggccaagttccagcttgatcatctctctattttacaaccaagttgcctcattgttcagttctgctgggtaaccaagaagaacgctggaaatctatcctggggcctccatgaccaatagcttgcaaggagagagtttacatttgggactgggaattttgtttaggcagcctatggaatgcaagaaaatatctggcaactctacatctgacaggactaacatttaggacaaagaactaaaaaaaaagaaaaagaggaagaaaaggaaagaaacttcaagacaacagtttgatttaaaaatgggcgttggaaaatagagaattctcgaaataaatattaatggctaataaatactttagaaagtattcaatataattaggccattagggaaatgcaaactgaaaccactttgaaattctgtctcaccccaaccagaatggctattatccagaaatcaaatgatagcagatgctgtcgaggttacggggaaagaactcttattcactgttggtgggagtgtggactggtacatcactatgaaaatcagtatggaggttccacagaaaagcaacacatagactaaccatatgacccagctctaccaccctgggcatagacccaaaggacattacatcctgctacagagacactggccctcagtgttcactgctgctcttttcacagtggccaggaaaggaaaccagccttctaaatgtcttgtcaacagttgaatggcttaaaaaatgtgatgtatacaaaatggaattgtactcagatatggggaaagatgaagtttgcaggtaaatggatagagctagaaaacagatgacccggggccaagaaggcaaacaccaccacatgttctctctcatgtatggatccagcttagactctttagagctgtgtgcttaacttggagcatgtgtagaagccaggaactagaaaggagctgtcagtgcccccataagggagaatatctggtagagcatcggtgatgtgagtgtagaaaaggatgatgctgggcaaggattagctccagccagaaaaaggaagacagggtatgggatgagagagttaacaaagacaatgaatgggtttagggaaaaatatcaagacctcctattttgtaagccaattagaaaacatgttttaaaagggaaaagaggggaggtctcctccatggctatactgttgtttctagaagccattttagaagcagcgttgaagcaatggattggaagaaaagatacagtaaactgtttaccctttaacgttctaattctgtcttctttctgagctgtcatgttgggtgtactccattcttttgtttggacccaggttttgcctgactagctgaacagtttttatatatgtgtctgatagtgacaaattccagtggctggttttctttaaaaagtatttacctcaactcaatctgagaggtattttcaattgctacaagattctagcttgatcagtcgtacttacaacacatggcaggttctctgtgcctcaaacccgtgttgtttctagtgagaagtcttgtcattcctggtcttggtgcccctgtagccttttatctctggctgctttcaggatttctcagcccctttcctgcttgctttctcggtttcatgtgatgtgcctctgtggttgtctctctgtattttgtggaggttcactgagtttcttggtggagtagctatatttttcaaagcatttggaaaaggtttagccattatttttgagggtttgggggactctatttatacatgcactagatggaggtttccatgggtcactggaactattttgacctttttctttctactttgtttggagtcagttctcttaggtcttcatgctcttttctatgttgttaagaaatgtgctggtgttccattgtgttcatttggctcttcaaagaaacagaaaacatgaaagtgttgatgcaacaacaaggaaatactggaagaaaagtagactggatgggaggggcagagggccggaggcatgcctgactggcagccgggaggacagatccaggagatgtgatccaggttagagaggatgcctctgggaagagcccgtggtcacaaagcagactggcactgctcctgtgcacccagcaatgacagttagggtgtggcctgccgtgtgcagcacagctaatcccaaggactcgtccttcctagccccacatagcacatgtgcgtgaccctacacccagccaacagaattgtacttcaggaatcttacttttttggggggtggggggagttcaagacagggtttctctgtgtagccctggctgtcctggaactcactctgtagaccaggctggcctcgaactcagaaatcagcctgcctctgcctcccaagagctgggattaaaggcgtgcaccaccactgcccggcacaggaattttacttttatattcagaactcctgcctggtcctttctgttttccagttctcccttatttctgtcatctgtcattttgttcccagaacatgtcaagcacttttgtaacagatgctttaatagccctgttcactaatccatcgccttcgtcatttcagagtcagtctgatttccctctggtttagggtcatattttccacttgcatgtgtctggaaatgtatcactagctgcagtacattgtgagtttcatggtttggaatgtgagattttgttctattctaagacaagtgttacaagttttctggctgcagtgcagttacatgcacatcagcattaagcctgctagccctgagttccagctttccagtgcctctagcatagcctgtttgggggtacgatgtggcctgagatctcgcttgtgcttgtgtgaggaggagctggtgggaacccatctgacccacagccttctgtgagtagccatggattcattctgctcacagctcctggaggctctttgtccagcttcacatagacattgtcttcagccaaagaccagtggccctgtaacaaattctggagctctttctctgcctagaccctaagcccctaccttctacactttggcttgttcaggatcagggcgtggtctcagctttccagttgggaagctactgttacttgatgacagttagtctggcaggtctaaagtgctcaggccccaatactggagtccagggcctggaagctggtgtattacaagttgacccaagtccagcatatggttggggtagggtgtgggagtccacgctaaagactgaagtatacgtttcagcaggctgtggcatgtagatagagggggaccttttacaactctcagaaccccattccttcatgttgcttgtagctttgcttggtatacacaagatgacacttgccaccacatcttaatctcccaatgggaccttggtgaagccatcacagccaacttgcacacagtgggtaggaggtaccttgtgtgcagtggcagtcagtgggccaggactgaagtgaagccagcttgctgatcctggtgaaggtcctaaaagaccaagatcatggatagatttttaaggagagacagtgctgagtctacaccctaagcctccgcacagtaatccagaccagctcttccacacagtcaagttaaacccatggggcgggggggctttccacacctgctcttcaggctgttttgcttcagcaagcagttctgtttctgggagtttatcctaagcacatagcaaggggaagcattgtacggtggaatgggggctggaaacagtagggctcacagcacaggtccgccctccctggggtgagtaggtgagctgtctagcgactcgggcacagggcccgctccagactcgggagactgagatccctcttgtgcttgtgtgtaaggggctggttcttgctctgtggatggaatagctctgcgctccaggcaagtgacttactctgtatgaaaacagaagtacctgtgcatcctgtagcatcgaagggtcctccccagaggcagcagggtcttgagcttcctttgcaacctcccaagaactaatttttggtttagattcagcatggcctccagcccacagacaagcacacagttagatactgggaacttagggtgcttttatgtatgttcaagtgcttgtgctttctctccagaacccgggacagagcatccctcactagattttataggccaattaaatacccctaagaattccagagagtggcttttgtgaagcagttagtagacattggtgaggcctcagattggtggtcttcagctagtttttacttgctctagtctaaaattcaggacagtagtggttggaagttcctggacatgctgaccaactggccactggtgtaatacaaacctcagtaacttcacttggtagacacaagatgacagttgtcactgcctctcaagctcccaactgcaccttggtgaagccaccatagccaacttgcacacagtgggtagggtgtgtgtgtgtgtgtgttttgttcatcaagcataattgtgggattggttcaacaaatgagaagaagtggacctcttcagctggatggcagttggagaagctctgtgtttcagtggctgttctgccaggtcctcccctacacactgtacctgtgcgtcttgtctgaggccattccagacccaccatcttctctacgcaggaaagcctctttctgttagctctggggaagtgggcggtaggggtgcttccagcctctgctgccctcatgctgctcatgtactgataggctgctcttgcggctgtgtggtgcatcctcctgctgtgctaggcgggtccctatctctcacattgtctgtcaggagttctctctgacctgggctcttatctgtccttcttagccaccggctagggaaggacaaagctactggaagagggaggcttagttctccatcctttcagcccagtgacagctccaggggcctctcccatggcttccttgcttccaaagtagttctttgccaatgttttttaagcctgggtatttcagtggcttcccaaggcctaactaaccttgtcagagtcctccctgcccccagcccagtgctgtctcccatgcctgcctgcacttcccacttgtgttactcacactccctttatgcactccttccaaaccaaagccctggggactacagcctcttttgggttgttttgttttgttttgttttatttttctaagaagggaaaaaataaactcagtacagaccaggaaaccacagtacacatctctgaatacgttgttacctacacaacaaactactgaaactcacgacaatgatctgaagtaattacaatagtgaattctgaaaaaaaaaaatctccaaggttcaaatgggtatatttcaaaatatgccatcacctgaaaaatttttcagaatttttcttaggttcctaaattattattaactaaaataccaaaagaaattagttcctcaaatattttaagtattgatgacccaatcagagccatcagttaatgagtataggaaattcatgagtaagtcaataacttttttctttttttaacttttttactgattcttgtgagtttcgaatcatgtaccccagtcccactcatctcctccccaatacccacccttcacccttgcagcctcccccaaaaatatagcacacacacaaacaacaacaacaagcataggaaacctctgatggaagctggagtgtgtcacagtgtgtcccacagtatgtctctctgtccacacatctccacttgtaatgtccattgcagtgagtcagtggtctcaggagagctggtcttgccactcatctgccatgagatgatgtgggggtgggcgtgatacctggtccctttagccccacaccatctgcagcagtggggagagctgaccctggggtcgtgagagtaggagagctagccctgctccctcactggccttatcactgggggaggagggaattaagctgaaacttccttggactatacagtggagatggccctgatgacaaaggcaccggtgagccagctcctcacaggctgcagcacaagagtcgagccttgactgggcagctcagtaagacctcaagggcatgagaactggagagctcgcttgggtggtgcggataaaggagagtaagtgggctgaccagctcagctgctacccaagcccagattgaggctctgaattcgcccaccccaaaatctatatcacttgcaattggttggggtacatgaaaaggctagccctactgttctgaagctacaaggtctccatgacgcagggcaacagcaggataaccaggaggagtcctgatgagtcagtactgatggtgtcacagaagccagacagctcggactgtggcctcttagtaataagtccatcactggttcccaaggctaagctactgtctccattcacactagtcaagcaggcagtcggggctgagaacaaggcattttctaagcccagcctcctctgccagctatcactgagtgccactggtttcttgtccttcctgctcatcatacaaaatagaaaaaccagctagggctctgtctccatctggatctctgtcctggacaggacttctgtgggcaaggctgcttcattacaatggatctctgttctccggtatccctggtactggatgggcagtagctgaccaactctaaaggttggaaaagtggtctttactctaaacagtgtttaattccttcccccaacagctgccaggccgcaagtatgcccctgggtacaatgccgaggtgggtgacaagtggatctggctgaagtgaagggtcccctccgcccagccgtgtcatagccatggagatgcctgctctgcccaactctgtgaactccagagctttccaagacaacaggaaaaaaagcaaatgatcaagaaattgccagaaaaaaaaaaaaatctaacaaaaagagtctgacccacgcctgggcagagatgaaagaatcagcgtccactgaaaaggttctggaaccttctagtgatgttttggaatcatctggaggagaaacaaagcagagctggtctgctgaaagcccagctcccactggaagccccgtgccccagtgctgttcccttgaacccttccaacttgaagaaataaagccggctctgtagcccctcctcctgtgtctgcgtggcacacttgtgcctggtgcctaaggatgctcagccctgcgccccccacccacccacccctgcactttgggtctctcacacactgttgaagcgtcttttctgaagcatttgttcttttctgaagcacattagagcaaaagggtgaagaatggccacagactagcagaaccgagtcttagagcaggctcgctttctcttatctctgaagagcaagctgagcatagggtgtggggtagtacagatgctgctatccaaaatgagggtgccagtcccaggtgaaagagcagtggcatcttattgttctcctgcatgggaacctggggggagagtccttaggagcgggtgtcaatctgaattgctgtcctaagctgtgagtttgtactgagacccctgctgtggctgctccaagcacatgtaacttgcatttaacttaattaaaacttaatgaaatttagcactcagttccctggtagcactgggctccattcaggcacacacagaacactgttggagagcaggtcaatattaggcagtacagaagagaacactttgatcttccagaaaagctggccttactgctggggccacctacctgcctgcggcccctccccctccccttctgaaatgggccagccctgggattctgtggtttgagtagcttgtgagccccctgagaagggtcaaagagaaagaaagcatctttatcttggctctgcgtgctatccctggctgggtggcactgctgcccctgaaggcccacagaacaggcatgcagcgttgtgagaagtaggtcctgggccacagtccagagacctcagccatggtggctagcacgtcaggacagagtcaggacactcggaccctaagagtccttccaagtgcttgtttcttcccctgatgactctactccctgggtgtagtgtgacacttgtgattagtgttgctacagaagtccatctgcccatttcctgtgttcactcgggcaaaagagggtgagtattctccagtctccaggactaagccctgaggactggtaaatactctggtatggcattgatgcagtccctcatcagtctcaccagagtctctactgccctttagagcttggatcagagctgaaagataaccacacactttgaatagcccacattggcagccgcctctgcactttgaggatcaggaacagggcgctgttttaacactggttctgtgttttctgttgacagaggaagtcctcatggacttaaggctctcgtggtttcctccatcttcagtagcgctaggctcagcctgcagcctggtggcagctggcatgctccccaggtatctgactgctgccaattgcaaccctccacacagcagtggtgctacagcaaatagccgttcaccaggcaaagcaattcagtaagggcagcatgtgactaggtggccacttcaggatgaagaataccagagggttcaaggaccggcagtcaggctacactttgtaagtgggtgcctggccagtgcaacaggaatgaacaatgttctcttgcttgacacgggcccctcttctaaagcctgctggctcctaattgcttggaaacatcctgtgttctgtttaccaaaacggacttctggattggctgtgagcagtatgtgctggcgccaaggagccaggcaggcctgccctggggctgatgagcaaggttagcgctgtagcaccaggctacaagggcgttgaaaggagacagctcagagctgggtgaatggaggaaagagcctgaggcaccctggcctcttcatctaatataaagccagccctgagggcagtgcttctgccaggacctcagccctcaggtcctttcttcctgttgggtttctttagcgggaaactcatgtgaaaggaagcaaacccaggattagaagatgactggaatttgagggaaattgcccttttaagctgcaaggccctggacttgtccggagacccaagctctgagttttggtgtgtcctgctctctctggaattctcaccagacaccctaggaccagagatttgcagtataggcttaccgcaaggggtcttcaaagcagtataacaaagcacccaaaagtgcttggcttttactacattttttagtatcctgacagaatgtcaaacaaatcctttacacctgcattttcctagaacgaggtggtgccagcagcagcaggatctttttcatgctgtgcggattgaaagcagagggcccctgtcttcctgccaaactcagtagcctcagggcaaagcgaatggacttgcccagagccagggtattccaggggtgggagcatagcccagtgggctgtgaatgaggctcagccagcagatcaatggcaagaaatgaaatgtgcctccttgtagccaacctgggagccagactgagacaaagacacatacacacacacacacacacacacacacacacactggcttccttcctcacagccccagggggcactgcccagcagatggtaagatccaaatgtggggatcctccatctcagacatccctagcactccctgcacccttcagtcctctccacagcctgaagcagggaagtgcaagatcagcttcgaattgaagctatctgtgggccatgctttgcctgcaggaggcacagggtgtccacctggttggcattccctgcatgcagccccacagatctgcttggctccatccttcagtctgacctttagaggctctggttgttcggagaacaacggagcagtggagaggtgaggggtgaggcagagctagagaaagcctcatggtgggtaagagctggccaatgtaataaactgcgctggcttgaaggaccctctagcctggaaatggatgcaggtgtatttatacaggaaatgggtcacggctggtaggggcctgcaggtatggccagatgtgtgcacctgctcttaatcacttcatcctacaagtcctccatcaaaacagttacttttgacaagggtcattgtgttatcaacctgttaatccactggctggttcagttccaactttctcagtgactgggctggagagagtggctgtccccagaccctgttactgatgaaacccaggtaatgaaaggactcttcctttgtgagagtgggagagaagccttactgatcaccttacgtcacagacaaccttcaggccctgagctcactcctgtcacaagacaggagtaatccattgaggaactgtagccacaaaaagaaggaagccccagcattcttagataccccccagcacacagaggtcctgtgtgatttatgtagagagccgaatgtggatatgctgtctgcgctgtgctctgtacgctgtgccttgggagggactgggagtcactcctgatatccctggctccttagcactcacatatcttatatctgaactcttaagagttgtcagtgggaggttaaaaggtacccatcagccgataccctatcagccatggtgcctgagcacagggctcccacctagggccattctccagagtctgtattttgttggtagtggtgataggttggtttatttgttggttggtttgttttttcgaggcaaggtttccctgtgtggccttggctatcctggaactcattctatagaccaggctatcctcaaacccagagatccaactgcctctgcctccccttagtgctgggatcaaaggcatggaccaccaccatttcagattcattttttttaaaggccacatgagtcatattgccactctgggaggtgacaatagctgcgactaaggatgagcagccattgtccaaacaatacgctctggctactgcccagtgggaagtgtctctctgcagcgtgggtatcctgctggagctcagcccttgaatccatctcttcaggggctcttgctttcgcacagcatgcagagtcctaagacctatgagccacccagtcttgaggacagaccctgaggaggtctagatgtcctggctgcttaacctggagatggtctctgggcaaagagaatctcaaggtccatacaataaattggcccttgatactctgttttcccacatccctgtatctcatgtggaacacacctctgccctcaggattccccatgcagctgctacccagataccagctgcctattgtcaagtctctgcagctctggggtgccttgtggccccaaggtgaccctggtcacccctaatgtcagtgttccctaagaccagaagccacccccttttgctagtctccttggcctaaagtgagtcttttggcagggctggttgggaaccagcagctgttgaggagaagggaccatctgggagaagggcaagctggctcagggaaccctggacaatagtaggggaaattacaggaaataggaagaaatggcagatccgggctctatttccaagctgccaagctttttgaatatacatataacaggtataattacttctcttcctttaaacacttccagatcatctttttcctttttataaactggccagcatcccaccctcttgtcagcagtactcaggcctcctctccagccttgggggctcccagaagcatccagacagggcccgtgggaagccaagagaacagagccttaggattgctacaactatagatgcttctggcatgtgctgggctggcagagctactgtccttcccagctacctccagggaagacctggcacttgtctccaggccaccatgtagttgctatggttgtgtgcctataggtgtttcaggttgaaggcatctgaaaagtgtggttttctaggtatccatgtcttagtgaaagggaccagagtgctgatcgtctcctctgagtccagctttgacctgcgaagccttacggaccgggcagtatcaccagtctggcgatcaagtgatcaggacgtaggccaggcaagagggactcttgagtcccacctaccgctgtccatctgttcagacgcccagtctaagtctcttcattgattaagcatgcacataaccagacagaaaggcatgggatgaaatgacctacctgaggtcccaatgttactggtcttgggcttcccggcttcctgactgcaggtgcaatgtgaacggtggccccaagctgttgccagcacaccttccccgccgtgacaagctgtactggaactggagccagagaaaacccttcctctttggcttagttttatttttttaatcaaaagaacaagaaaagcagccaatacaacaactctgggtatttcctattttacttggcaacatggctccctttcagggaggccaagagaagagggaccctgggagatggggcatgggcaaggtactgtgtgcactaaactgcatgggggtcagggctgtgatgtttggcctccccctcccactgcagctctgacttgtgaagtcttggggctggagttagtttgaagcctgaggaggtctcaagtcttagcatccctcccagcagcaggagtgctcgcttgaggctggggattgggcaatgcacagaggaagagagggagaagaagaggcctagaacctcagatgtcttggaccccctccctctctcctacgccggaaccacctgggtgtcacttcctgctgttaccaagatggaaggggaccggaccggaaccacctgggtgtcacttcctgctgttaccaagatggaaggggaccggaccgagagggcttcatcaacagagccagcaggtgtcctaggtccaccattgggttccaggctcctagcctgtctgttgcctcgtttgcaccccagatgtaagacttcattaaagggttcctactagactgactgttcaagggcttttttttttttttttttttttttttttttggctttttcgagacagggtttctctgtatagccctggctgtccaggaactcacgctgtagaccagactggcctcgaactcagaaatctgcctgcctctgcctcccgagtgctgggattaaaggtgtgcgccaccaccacctggctcaagggcctttttaattggacaaataggggtggaaatgtagtgggttggccctatgttgcttatattctaatgctaaggtgggccccccaaaactgccccaaaaacaagaaagtctgcnnnnnnnnnnnnnnnnnnnnnnnnnnnnnnnnnnnnnnnnnnnnnnnnnnnnnnnnnnnnnnnnnnnnnnnnnnnnnnnnnnnnnnnnnnnnnnnnnnnnnnnnnnnnnnnnnnnnnnnnnnnnnnnnnnnnnnnnnnnnnnnnnnnnnnnnnnnnnnnnnnnnnnnnnnnnnnnnnnnnnnnnnnnnnnnnnnnnnnnnnnnnnnnnnnnnnnnnnnnnnnnnnnnnnnnnnnnnnnnnnnnnnnnnnnnnnnnnnnnnnnnnnnnnnnnnnnnnnnnnnnnnaaaaaaaaaaaaaaaaaagacaccgagggaccctgccccagttaattctgattgttaaataaagatgccagcagcagccaatagccgaagagaagaggcataggcgaggtttaggtttccccggcttgagagcccgaggaagggaggaggaaaggaaggaggagaaagaaaggagccgccatggaagaagaagaatatgcaggagggaggagagccacagtggggttgctgagccgtacaaacatggacgtgtgggctggccaaattagagttaagagcagcccagacagagcatagaagttagtaagcagtaaccggagttatcagaagggaaggggattctaacagcatggaggggaggcagttgcccagctattgtgctgcctaagggatatttaaaaatataaggctctatatgcctttcatctggaaacatatatggtcaaaaatgggagagaaaaaataaaccagcgcagggatttttaaaactgtttttactacactagaccttgctagagccactgatgtgagtcacgtgccttcttgccctcctgtcctgcacagaagctgggaggacagaggacagctctctgtgacctaacaggaccttagagcccagggtaccctgcaaagacggcagtagggtgaaggccacagctgacatgcatttggctgaggggacatccaggaggccagtggcatgactttgggtccagctctggactctgactggccaccaccccttagcctcacgagctgatgaccgtagcttaaggaagtatcctgtgaggctagtcctgccatttgggctctgctgggggatggttgtgtgcactgtgtattcagatgctgatttctatgcccagacatctggtcccagtcaagcatctccggtctcactgttatgtaaaaattgttttccctcacctctgattggttaataaagagctgattcagctgataactgggcagagggaagacggaaggcagaatatctgatcctagtgatgggggtcccaagtgagggaactgagggagagaagatgtggagggaccaggtggagggaccagggggagtcaccatgaggggacacatggagtagaacaagtctgagcaagactcggattacagctcaaggaccatgaggctgggaccttgtagggttagaataaatgaacatctgcccagttagggctgccagcttgttaataaatctattaggtctcagtgttgttcatttgggagctaacgtgggctagagtgggcatagaaacactcagcagttgtttaggagcaaggggaaagaaagccgcctaaaattacttttacagggctctctgaaggtgtctcctcccgtgtgctcagctccaaggccagggctataacaactggccctgacacaggacacagagcacacttgcttcccccagccttagcctgtccttcctaggctctgcctcctcggtcactgtgaggtctgagtctccattcacagccttgctcctggggctaagatcctcccttgtccatctgctgagctgccctctggaacctgcgaagctggccaggtggtgctgagagtgaactctctcactgttgaatgaccgaccactccccatccctgcctgagttaggatgttcagcctacaggaccctgattcagcactgaagcatcttcaaagaccaccactaataaactatgtctccaccagtgaaatgagccaatccaagccagattagaatatatcaaaggtgggtttattggaaaactactcttgggtgagttcactggccccattggccagaggccagggaggtcagcatagggagatgagtgaaggaggaagaagagaaagagagagaagtgggggggagaagagagagtagaccaaactgtctggattatatagggaaaagcctctgggaagggcagccagcccttgggctgggaagttcagggttgggggcagggtatgtcaggtagggactgagggatgctgggagaacctggagaccaggtctgctttgatgtgtaaaatatgcacctcagtcccttgtcctgggctccaagaccaaacaacgaggccaaggcttttgaaactacacctgctataagtactttttccaatgtctgcatcaaatatggatggttttcagaatcacatagtgggcatttaacagtacccacagtcagtttcaccctttggttttgtgaacttgaggccatggttggctgaatccagtctactctcacattgaaacttgtctctctgggcctgtttattttttcttccattttaagaaaaaaaaatatgacataggacactttgttgtttgtttttgtgccatggaaggtaattaacttatcaccaggcatgttagggacagaatttttaataaaaattagatttctcttgaatttgtctttggtgggaactcacataattagccatatatatagtcatgcaatattgtcaaacagaacacagaactttgtcagctaccctgtaatttgttgtttttttttctttaaaaaaaaaaaaatcagcattgagaacaaatttcctgagatcttagcaacgtgggaagtccagacactagaactgtgaagaggaggcctgagatggagaaagctcaggcctgagcaatggtggagaggcccaaggacctcaacctgcccaacaacaccaggatcatcaaggaagcattcctgaatagcattagcatctccaaggaggccaaagtgccacctcctgcactgccagcatcttccttctgtatgccacacggataacttcacaatgaaagggaagcgcaagtctcaatcaacgccagtgatgtgcaatcagccatggaagagatggcgtcccagtggttcattacaccattgagagacgctctagaagaggacaggcagagcagtgaggcaaggaggaagagtctgagtaaaagaaggacaaagacaaaaaaaaaaatcagaggagcaagacaaaagcagggaggaagaggaggagggtgaggaaggactgcaagaggaaagacagaatgaagaggaggaggcaactatgtggagagagtgggcagactgtggcatggtggaagggaccctgagatcctgagtggcgtttacgggaagcctctccctgcaaggcacagctgtcctcagcacagatgcctgagatcaaactaaaacctggacagaacaatccaaaccagctcttcccagactcagagcgtctgagttacagaaacctgctgtcttagggttttactgctgtgaacagacaccatgaccaatgcaagtcttataatggacaacatttaattggggctggct

SEQ ID NO: 396 - DNA, 1207 bp, Mus musculus
gccggcgcagacggcgaagtcatggccttgaggttgctgagactcgtcccggcgtcggctcccgcgcgcggcctcgcggccggagcccagcgcgtgggacgaattcataccagtgtgcactgcaagctgaggtatgggcttttggccgccattcttggtgataagacaaccaaaaagctgcatgagtacagccgagtgataacagtagatgggaacatatgctctgggaaaaacaagctcgcaaaggagatcgcacagcaactaggcatgaagcactacccagaagcagggatacagtactcaagcaccaccacaggcgatggaaggcccctcgacatagagtttagtggcagctgtagtttagagaaattttatgatgatcccaagagcaacgatggcaacagctaccgcctgcagtcctggctgtatgccagccgccttcttcagtatgcagatgccctggagcacctgctgagcacaggacaaggtgtggtcttggagcgctccatctacagtgactttgtcttcctggaggcaatgtacaaccagggctatatccgaaagcagtgtgtggaccactataatgaaattaagcggctcactctcccggagtacctgccaccacacgcagtcatctatatcgatgtgcccgtgccggaggtacagagcaggatccagaagaaaggagatccacatgaaatgaaggtcacctctgcctatctccaggacatcgagaatgcgtacaagaaaaccttcctccccaaaatgagtgaaatgtgtgaggtgttggtgtacgattcctgggaagctgaagacccaaccaaggtggtagaggacattgaataccttaagtacaacaaagggccttggctgaaacaggacgactggacctttcactacctgcggatgctggttcaggataagacagaagtgctgaattacacgaccattccggtctacctcccagaaatcactattggagctcatcagggtagccggatctacaacagcttcagagagctgccaggccgcaagtatgcccctgggtacaatgccgaggtgggtgacaagtggatctggctgaagtgaagggtcccctccgcccagccgtgtcatagccatggagatgcctgctctgcccaactctgtgaactccagagctttccaagacaacaggaaaaaaagcaaatgatcaagaaattgccag

SEQ ID NO: 397 - protein, 358 aa, Mus musculus
AGADGEVMALRLLRLVPASAPRLAAGAQRVGRIHTSVHCKLRYGLLAAILGDKTTKKLHEYSRVITVDGNICSGKNKLAKEIAQQLGMKHYPEAGIQYSSTTTGDGRPLDIEFSGSCSLEKFYDDPKSNDGNSYRLQSWLYASRLLQYADALEHLLSTGQGVVLERSIYSDFVFLEAMYNQGYIRKQCVDHYNEIKRLTLPEYLPPHAVIYIDVPVPEVQSRIQKKGDFMKVTSAYLQDIENAYKKTFLPKMSEMCEVLVYDSWEAEDPTKVVEDIEYLKYNKGPWLKQDDWTFHYLRMLVQDKTEVLNYTTIPVYLPEITIGAHQGSRIYNSFRELPGRKYAPGYNAEVGDKWIWLK

SEQ ID NO: 398 - DNA, 84675 bp, Homo sapiens
  misc_feature (1)...(84675): n = A,T,C or G
gctgggaaaactggatatccatatgcagaagaatgaaactagacccccatctctcaccacatacaaaaattcaatccaaatggattaaagacttaaatctaagactcaaaactataaaaccactagaagaaaacattgcggaaacactccaggacattggtctgggcaaagaatgatcttgtgtaagacctggaaagaacaggcaaccaaagcaaaaacagagaaataagattacatcaaactaaaaagtttctacacaacaaaggaaacaatcaacagagtgaagagacgacccacagaaaatgtttacaaactatctatctgacaagggattaataaccagaatatataaggagctcaaacaactcagtggcaaaaaaaaagcaaaaaacccaaatgatctcatttaaaaatgggcaaaagatctgaatatatatttctcaaaagaatacatacaaatggcaaacaggtttgtaaaaaaatgctcaacatcactaataatcacagaaatgtgaatcaaaaccacagtgagatgccatctcatcccatttaaaatggcttttattttaaaaaagacagggaataatagtttttggtgagaatgtagagaaagcagaaccctcattcattgttgatgaatatacattatttttggtggagttcttaggtttttcaaactatcagatcatgttgtctgcaaacaagactaatataatttcctcctttccaatttggatgccttttatttctttctcttgcctgattgctctgactaggacttccagtactacgattgaacaaaagtggtgaaagtgggcatcagtacagccactataggcaacacaatggcggtttctcaaaaaaataaacatagaactaccataaaatccaacctttccactactgtgtatatatccaaaagaaagcaaatcaatacattgaagaaatatctgcactcccatgtttattgcagccctattcacaatagccaaaatatggaatcaatctaagtgtccacctcaatggatgaatggattaaaaaaagtggtactatatgcagtggaatattattcagccataaaaagaatgaaatcttgttatttgcagcaacatggatggaactggaggtcattatgttaagtgaaataagccaggcacaaagacaaatatcgcatgttctcactcatatgtgggagcttaaaaagtggatctcatggaaatagtagattggtggttatgagaggctgggaagggtataggggactgcaggatgaagcgaggttgattaatggatacagatgtatagtttgatagaagaaataagactgagcattagagatcagtaaggtgactatagttttcagtaatctattgcatatttcaaaatagtcataagagaaataatttgaatgtttctggtataaagaaaagacaaatatttcaggtgatgaatagcccatttacactgatttgatatttacaaattataattgcattcaattatcatatgtactccaaaaacatattcatctattatgcataaatttgaaaataataaacactcatataaggagacacacagaagagatctgacacacagatcatgggaggtgacgtgacctgagatgcagagatcaaagtgttggtgccacagaccctgaagccaggagcccccagaagctgggagaggccagacagggtttctcccctggcagctgggagaggccagagagggtttctccctttcctcatctggcaggggaggaaaaaggaatgtcctggctgggtgtgggattgtaggaagtgagggagggggcgggctgatgcggaaggagaacattccagagggcacagtgagtcccaaagccccaagcggggtggcaggagccagcctatctgaggagcacctggggccatggaattagagtggcgagaacaggggaggtcggaaaaattggaccagagaggaaacagaggtcaggtgggacaaattcttccctcagagggtgcgggctgtgcaggaacaagggtggcccatggacagcagctcctccagtagggagtgtgggagatagatagccactgaggagggcgaagggcccaaacagggagccaggagcgggctcaacagcctctgcttgggtgccctcagccaggcaggggccagcctggccccagaggcacaggctcacctaattggcagtgtgggcctttccatcatcagggggataattggaccctggagtccctatgctcatcagaaaaagccacagtggtttctccccagtgcctcaggcagcccacttctcaagagcatgttcaaggcttgtctggtcactgtggccagactgggagttgctggacacaggcagaagccactcttcactcctgcaggcagctgcagccgtttgcagtgaggcttccagacgccccaggtaggatccagcactttccatgttgccgatgggctcctttcgctgtgattttagggtacgttgtattccttgcatggggagagagctcttcttttatgtgtgtgattgacaatccccactccacatgccccccacatacagtctggagcagggactcccctctgcagtctcacggccagcaccaagcagaatggctcatggatgctccataaatggcccttgcatttttgagtactgtgctgggtacatattcacaggcattgggttatgccctgatgtctaacatcatacccagaatcagccagcagcctcaggtggctgaatggggcagacagcatttgctcactcatcattgacgaggactggttctgggtggctctgccaggcaccagggaaggcatcagagtaaatggctgcaggctgatggtaggtgcagccgggaggagctactgcagtacccgtctcacggaccaccccaaaatacatctgttctgtggtacggaaagcttcactttcctctctcagattggagacctaggtttgaatttgtgactgggcaaaaacagtctttgtaacatattggagaaccttgtttacgatgagaggatgccagcctccctcggcagcgtccgcttggactttcagtctgtccacagaaaccagggaggtacagccaagttaaaaaggcagccatgcccgcagcgatggggtaccctggaacagaaacgggcattcgagggaaaaaaagatgaaagccaaagtctggagtttagtccacagtaataccaatatcaatcccttactgtgacaaatataccctcttcatgtaggaagttagccttggaggaagctgaatggaagatctcccagagctctctgcactctctttgtaacttttctgtaaatctaaaattattccaaaataaaaagtttatttaaaagaaaatgcagccattgtctaacaagttcaggggatggatagagtgtgctgtaaagggccctgaatttgtaaagtaacacagtttcaatttaatgaatcaatccggtattaactagccaactcactaatgatcagttaccactatccaaataatcaagagaaatctataggtgcctctactgttctgggttaaaagcacaagaaccaaagctcactacccccaccgccagctctccccagcaaacccagtcaacaggtgggggctgctggccttccaaggagctcctgtggaccccaactttcctccttgtggactttaaagccccctgtggccactcagctgggaagaggacacagtcaccaccctggatggtgtctagagaggctacattcagactcacatcttgagacccctttaatggcaggggttcttattgcttttgttttggggagacagtaggcggtgactggagtgagtagtaaatgcttgtgaaattgatcctaaactctgaactgcacgctggcattttaaggcagggaatggccatgccgccccagtggatgatcttgggttcccacagaatgctcaccctagacggcaggagtacaggtgcgtttccaagtgtaaacctgtccctgggcaattcccttctagaagtttgtttttcagcctgcaactcttccatgaactcgacttgtctagccaaccccctacacgtcaccatgaggctctccagtaagtgccgcgcaccacgcctccccagcacagactccagattattcggcacccacctggccctctcctagtcttctcatcaatttttagcatcctgggccagaaacctggggtcaccctccccagctgtgagctggtggaagtctgccattcaacccacctagactgccaatgaaaagaaccaccagatgccctgtggggcaaggggctgtggctaccctctctctcccccacctgtggaccaggtccccgagagccaggcagccctttcctgggagccctccctgcattcctccggctggttagcccagtttggggttctgccctggtaggctgatagcccctcacctcatgccgaggctgctgccccgacttgcaggaaccctcagatgaaggaccctaaggagggccagctctgtgtccatgcccacttggatcttgagagctgccccaggcacgtgtggactggtagtgcccctggactcagagctttgggttttgcccaccctggagctgcccggctctgttcctcagcatatactctcttcctcattcctacttcatggttatatgtaaatgcaagcacacagaagttttctactttaaaactcagaagatcagcagatcactgctctctcctggtgctctggggagccacgtggcctctctttgcaccaaaactccccatccaagtccagctccactctctctctgcctcagctgccctgcagccctttcctcttgctctttgatgttttgtaggcctgcagctcccaagcacagaggcatgagtggggagaatgtcaccaaggtcagcaccttcatcctggtgggcctccccacggccccagggctgcagtacctgctcttcctcctcttcctgctcacctacctctttgtcctggtggagaacctggccatcatcctcatcgtctggagcagcacctccctccacaggcccatgtactactttctgagctccatgtctttcctggagatctggtacgtgtctgacatcacccccaagatgctggagggcttcctcctccagcagaaacgcatctctttcgtcgggtgcatgacgcagctctacttcttcagctccctggtgtgcaccgagtgtgtgcttctggcctccatggcctacgaccgctacgtggccatctgccacccgctgcgctaccacgtccttgtgaccccggggctgtgcctccagctggtgggcttctcctttgtgagtggcttcaccatctccatgatcaaggtctgttttatctccagcgtcacgttctgtggctccaacgtcttgaaccacttcttctgtgacatttcccccatcctcaagctggcctgcacggacttctccactgcagagctggtggatttcatcctggccttcatcatcctggtgtttccgctcctggccaccatactgtcatattggcacatcaccctggctgtcctgcgcatcccctcggccaccggctgctggagagccttctctacctgcgcctctcacctcaccgtggtcaccgtcttctatacagccttgcttttcatgtatgtccggccccaagccattgattcccagagctccaacaagctcatctctgccgtgtacactgttgtcacgccaataattaaccctttgatttactgcctgaggaacaaggaatttaaggacgccttgaaaaaggccttgggcttgggtcaaacttcacactaagacaactaaatgtcctagagtaaaatctgtagtgatgaaacaacattgtatgtggcactttgtgctctttaaattaatttttaagttaaatttaacaaacctacagaactaagtgaaatttaacaaacctacacaactgtgcacaagtaacaagccttcgtctgcatatgttttcacaaaaggactgtgctcatggaaccagctcccagatcaagaactagaagctgccttcacgccctctcccagtcattaacccttctccacaaaaagcactgtcctgacttccaaaaccagatgctagcattggtgtttctgaggggcttacacataaagtatgtgccctgttatgttcagcttctttcattcaccgtgttgcttgagtgaatccttgatgtttttgcatgtaacaataattcatgcattctcattgctatccaatattcataataaataatacatttatactgtataatacacaatgcataatacattcatactgggataatacatatactgggataatgcatatactgtattgtgtattatatatacataatacattatgctgggtgaaaccctgtcccacctgtcccagcaggtgtgagccactgtgctcatccataatttatgcatctaaacacagataaggtaagtcaaaatataatgtcataatcttatgggaccaccatcttatgtgccgttcagttcatcattcaccaaatgtcattgtgtggtgcactactgcgtcagttgagaatatttgtgctggcttatttctggatcctctgttctgttaaattgatctacgtatctatcaatatcacaccctccatccatacaacacagtcttgatttatatgattatgtagtaaatcttaacactggaagagtgactcctcccactttattcttctgcttcaaaattattgtggctattgtacagcctttatatttttatataaattttatagtaagcctgtcaatgtctacaagagaacctcgctgagattttgctagaaattccattaaacctaaaaatcaatttgggaagaactgacttcattactctgttgagtctttcaatccatgaacatagtaaacccctccaattattgaggtcttcattctttaaatcagtgttttgtactttttaatatgcagattctgtgtgtgttttgctggatttagacctaaatattatattttctttgaagcaactgtaaatggtattccatcttttatttcagtttccttctgtttgttgttagtacataggatgcagctgattttcatatgttgacattgcagcctgcaaacttgctgcgctcactcattagttccaggagttttttgtagattcctttgggttttctatgtgaacagtcatgtcaactaaaaatagacagttttatttcttcctttctgatctgtatgaatttcattttttattttttgccatactgcatggcctattactagaacttccagtgctctgttgaataagagtgggcagagcagatatccttgccttgtttcctccttagaaggcaagcattcagtctttcatgattaagtacaatgatgcagagttttcacgcatgtgctttatcaagctgaagcagctcccctttagtccttatttgctgagagcagtttttgtttttatcataaatgagtatttaattttgtcaagtgatgcagaaaactgcatcaggcaatctggtcatagatttcgtctttcacctgctggtaaggtgtattacattggttgattttcaaataccagattagccttgcatcttctgaataaaccaccttgggttgtggtgtatgattcatttcatatagtgttggattcaatttgctaacatttcgttaaggatttttgtgtctaagttcacgagagatattggtctattggggtctgaagttattttcatgctgtctaatatagtgtggacgtcaaagcgacctcctagagaacattcctagctctcagaacgttctagctggggagggaaaacggaaaaaggggggcgagaagcggagggacggggaagtatatagtaatacttcccttgaaccagtaaaactgtaatgcccaacctggtttttactaactgttttcagactctcccttttcctttaatcacctagccctgtttccacctgaattgactctcccttagctaagagagccagacagactccatcttggctctttcactggcagcccctttctcaaggacttaacttgtgcaggctgactcccaccacatccaagaatgcaattaactggtaagatactgtggcaagctacatccgcagttcccaggaatttgtccgattgataacgcccaaagccccgggtctatcatcttgtaatagtcttaaagcccctgcaccttgaactgtttactttcctgtaaccatttacccttttaactttttgactactttacttctgtaaaattgttttaactagaccccccccccttcctaaaccaaggtataaaagttaatcaagccccttcctcggggctgagagaattttgagcgttagccgtctctcggtcgccagctaataaaggactcttaattcgtctcaaaggtggtgtttttctaactcgctcaggtacaacaaaacatccacgcaaacaggttgtgagaagttacgtctgcgtgctgtgatacctagaggaaccactacgaaaactatacataatgatatttcccaagacattatcagtaaatcaagatggaattctaaaaaaatgtactgtatccattggaaggcacaaaaaaaaaaaaaaaaatgcaaaggaaacaaggcaaaaaacagcagacatgaaccctaaagcttgttaaatggatttcaggtgccctccaggatctaaaaaccagaccctcctgcgttggggaccgggaatccgtatttttgacaaaaagcaattcttcaattatagaaacatccatagaaccggccgtagtttacacagctgcattcccactgttttacaatcgcatgatcatttctgaaaagttgaaaacaaagttaaagaatatttaaggggttaagaacaaaaagcctggggaacacaaaagattataaaaacccttcccaacagcaggcatacttggaaggaaacctcacatgcaaggctccttcgtggagcccagagcccaggtcctgacgggagcacattttaagagatggacttgccggcgcggtggctcacgcctgtaatcctagcactttgggaggccgaggcgggtggatcacgaggtcaggagatcgagaccatcctggctaacatggtgaaaccccgtctctactaaaaatacaaaaaattagccgggtgtggcggcgggcgcctgtagtcccagctactcgggaggctgaggcaggagaatggcgtgaaccagggaggcggagcttgcagtgagcgcgatggcgcccccgcactccagcctgggcgacagagcgggactctgcctcaaaaaaaaaaaaaaaaaaaaaaaaaaaaaaaaaaaaaaaaagagatggacttggagcgtgtgcttttgttttctatgctattcaatgtgttcacagcaggtcccctggatgagaccacttagccttcagctccggaggcgacccaggccggccttgccaggtccctctccctgacaggcgccccgcgacaggggtcccaccccgtccctccgctcctcgccccctctttttccactttccctccccagcgagaacgttctgagagctaggaatgttctctaggaggtcgctttgacgtccacaccgcgcctgggggattctgcggggagcacaggaccctgggacgagacgcagaagtcgctccacgccctgggcggcctcagctcccgcgacaccgcagcaactcagaacccaggcaggggccgggcagccagcatgctgcccccacgttcacctccaactcccacctctcggccctcgccccaacccgcaggaccctggcagcgcactggctgtctccgcggaagcccccgagggcctcggcgcggccccgccccctggaaggttcccgacaggcgccgcgggcaccccggccgtgacgtcacggcagcgcgccggccgcgagagagggccccgtcgcgaccgcgtccccttgggtccttgatcctgagctgaccgggtagccatggccttgcggctcctgaagctggcagcgacgtccgcgtccgcccgggtcgtggcggcgggcgcccagcgcgtggtgagcgggcggcggggtggcagggtggcggggtggcagggtggcggggtggcggggtggggagcagttccacatctcccccggcctctggcggcggctcccaggtcgctctccgggtgggtttgggggacccctcctgcctccggaattgtttggtctttggtcgtggacagacctcagggggccacgagcttctccaggccattttatctcagctttaagcaaaacgctggagcgcggaggtgatcagggccccgaggctgccctgatgcgggaggcccgtgtgcaggtggcaggccgggggcacacgcgcttgtcattagataattcacgtagcagccctgtcaagagccgtttaaaggtcgggccctgctgggtgcttgggtgatgccatgttgagcagacacggagttcagtgcttgtgtccgcttccttttgcctttactctgactgactactctcatttcttagcattttgcccccaccttcttcagtgaaatcgtttcatacatttgtaacacagttggattgctttgtcacattctgccttacatcttgggatccttctacctaatgcgttttttaaaatgtgcatacattgagcgcattctttgtgctataaggttctatggattttttctttgtgctataaggttctataggttttgacacgtgtgtaatagcatgtctccaccattataggttcgtacagagtagcttcactgccttaaaaaattcccctctgctttacctattaaacccttctttttctccaacccctgacaaccacagatctcattaacatttccatagttgccttttctggaatgtcatataattagaatcatacaatatattgccttttcagacgccttgaatacttggaaatatctatgtaagattcacttatgtcttcgtggcttggtaactcatttctttttaatcactgagtaatatctcattgcatggatgtacttcaattcattcagcaattgaagggcatcttggttgcttcaagtttttggcaattatgaataaagctgctgtaatcgtgtacatgcagatttctttttggaaatacatttttatatcatttgggtaatacctggaagagtgattactcatgtagtaagactagttttctaagaagctgccaagccatcttccagagtgactgtgccatttgactcccaccagaagtgaaggctctccttgttgctctgcgtgctcgccagcatgcggggctgtcggttactttggattgctatccattctgatagctgcgtagtggtatcttgtttcaactttggaatatctcatgatatacagtgttcatcttttcatatacttatttgctatctgcgttaatttcatttgcgagaggtgtttacatcttttgcccatttttaaattgggttgtctgctttgccttgttttgtaacttgtttcttccttactcttcagttatcaaatcaagatcgaaaaatatcttgatatttcatattctcctgttttatttaaatttcactataaagtattttaatatttttgtgtttttctgagtacttagtattccataatatggatatgccttaattttgtttaactattcctccgttgttggacatttaagggtttctatttgcatttttggtgttacatcatacttcattgagcatccttataggtcaatcttatgtatatactctttgaatggattcctaatgctgtagacccagcgtcctctaggtttcattaccattagcagtttaggatggtactcattgtcttgtcctaactctgtaatcattttttaaattatttctcattttgacacatgaaaaactaatgtttccttgttaatagtcttttgtttttttgtagcaaggttgaccactttttcatgtggtttttggctatattttataattttaaaataagctgtgtgtttttattctttgttttcttattgttctgtacaatttctgtatatagtaaggttattaccccatcatatctgttgaacttcttcagtttgttttacttttggttatgtttcttttctttttttggaaggaatgttcccactttagtgtggagagtaaattgggctgctggagacaggcattgaagcaggtctttgccttgtagatgagaggtgtgagggtgccgacagagtcagcacatggcatagggaggcgatgcagtgtccagagagtctgaacagttaggattttgtgtgtaattctgcagttgaaggaaggagaaaggtatcaaagacgacactcaaatttgctctcttttgcttgttaggtagtggatattccttgctgtgagggaaagcagacttgggggctaggatatggatgttgcatttcaccttagctctgttaccttcaggtgccttcaggacatctaggtggagctgtttaataggcagtggggtaacgaggtcaggacatggggacagaagcttggattagagaaatgttttttattcccttcccttcactcctgagcttccctccatccctgtctttcttcctcccgtctgtccgtccatccatccatccatccacccctccctccctccctccaatttttattgaacatagtaaacatatttaataaaaatttcaggcattgttccagggcctgaggatttagcagtgaacaaacagacagtatatctgcctttaacgaaacttacatggacagagtggtgggggatagacagataattaaacaaattaataggcaataaagatgtagatgttggcatttttatcactaagaggtttcttggtatttttacctaatagttactaatgcctacaggaaccagagtggtcacaatgtgctgctgtgtgattttgtgtttttcagagaggaattcatagcagtgtgcagtgcaaactgcgctatggaatgtggcatttcctacttggggataaagcaagcaaaagactgacagaacgcagcagagtgataactgtagatggcaatatatgtactggaaaaggcaaacttgcaaaagaaatagcagagaaactaggtatgattttatgttacacagaatgatacctttttctcagatatatggttgcttatttcactggtttttcttcaatattaatattaaataatattaaatatttaataattgggcctaaggtgggtatttcacatttttgtttattgaaaaagctgttttataaaacgaaacaagaaaaagctgtttttaatcttttatgtttggaaaatttgtgaaaatccatgctggttgtcaatttgaattggaattttatgtgggcagtgtaagcagggcacttccacataaactgtcgtgtttgaactttgtgacagcctctgaaatagagccgaggatggtactcactcacagatgggtgtactcctgagtgagcagatgccacatagctgggtcccaaagccaaggttagagccccttcctgactcctggtgcagctgagtgtccattgtacctttctgtagcacctgcatgacagcagctgcccgctagagggggctcctgtggttacagggagcagtcctttcaggaggaacctggataagggcactgtgcaagctctttcgctcacatgcttgcttgtatatgttgtgtgttcccttcatacgtgatgaaacccaggcatgtaggtgactttctctaggtcattggctccatccctggcggtgagattcgggcgggctgtgtgttttggctagtccccactgctccctgcggggagtgagtgatgtgcatcagactgcatccgactgtttctcttttcaggcttcaagcactttcctgaagcggggattcattatccagacagtaccacaggagatgggaagcccctcgccaccgactataatggcaactgtagtttggagaaattttacgatgatccgagaagcaatgatggcaacagttaccgcctgcagtcctggttgtacagcagtcgcctgctgcagtactcagatgccttggagcacttgctgaccacaggtgcagtatttctgggcagttagatctgttctgtacttgaacactattctagaattcaaccacgttaaattgccactgagtcgagctttcctttaagggtgtttgatgaggtgagttctgtctttccaacaagatcatgaatgtcttgagattgtgttatttttgcatcagaattaatttaatgctgtttcactatggatactggagtgagatgtatggattgtatagaaggctcaaggcactactttaagcttctatacttacatattcatttatatatgaaatgtgtcaaaacaaaggggtaaagagagcacagaagtgtccaggaggaaacgggatcacacttatgaagactgtgcatgtgccatgcagacagagatgtggatgccaacaacatagggttgtccggagggcccagagataggccggaatcaccataaagccacgaggcagacgtgaatcttgataagatgacggggggaggcagaacacacagggtcccataggccagtgcagtaggggaggatgcttcccttgaaggtatccaaagcagaaaggaagagctgtgtactggggagcctgggagacggaaacagggatcagaaagtatagttaggagaggaagggaaggtggatgaaagggcatgaacatggactacttgtgtgcagaatgaggttagggtccagcgacgggttactgtaatcattctgggaaacagcagtgcatgctagacatcctgagagttggaccgcagatgcactgccaatttttggtcaaagctaccatgccacggcggtcctcagttcacaggtagcagcaaatggcacatctgtgtgcggagagagggagatgggtggactcttagggccttcgtgtctgttttatattgcagtgcttgctgctttcgttgattggcagtgcccctgatgagcttctcacgcacaagctcagccgccactagggttggcttcatggggtctgagccgtgagaacaagaatgtggttttcactgggagtggccggctcacaggcttcttctcagagctgagctaggagccgctgcctatgctccttcaggtctccacggatgcagtgtgtgtccatgacacgtatctacacagttgtacggtggtggagttattgtcttgctttgaaaaagttgaaaacattttattagtgcttctttttttcttatatgaacgtaaaccctgatcttggttagtgttactcctaagaaaacaatgtggtctgctgtttctggtttgaggttctttaccaggagccaatccaggagctgatgtcgtagcgtggacttcacactgacatccaggcttactccacgttctttttttttttttttttttttttttttttttgagacggagtctcgctctgtcgcccaggctggagtgcagtggcgggatctcggctcactgcaagctccgcctcccgggttcatgccattctcctgcctcagcctcccaagtagctgggactacaggcgcccgccactacgcccggctaatttttttgtatttttagtagagacggggtttcaccgttttagccgggatggtctcgatctcctgacctcgtgatccgcccgcctcggcctcccaaagtgctgggattacaggcgtgagccaccgcgcccggcctccacgttctttttaaagcattcttcaaccctgtcttctgactactcatttcttaaaatgaaaaagaaacattttacttgttaaataaagccttgctttttttggtgctatagtaacctatttcccatttagaaaaaaaaagtgcagcttgctcccatctcagtattcttggggcaaattggaactgggttaacgtattcattaaatatttagtgcatgtctgctgtgtgccagacccattctgggagctaagggcgccacagggagggaagcctgtgttttagtagagggatgaagactcgatgtggaaacaggaatgtcttgccccaagtgagtggtggctgctctgaggaaggaggctgtggggagaggctgggtaggaagattaggggaggcctctgcccagacacagcagggctgactgcaaggaggctggctggggaccctggggactagtgctctgagctgcacaagtgtccgtcggggctgctgtgatagtaacacagccagtgaggctgggagtggacagaggtgaggttgagaagtagcccaacatcagtagatctgactggaatggtgggggcaggagcaggatgggggtgggcactgtaggggtggaatacgttatttaaaaacaagcactttttgtattaaccggatgctttctgttatagctgacttaatgaaacgatgttatattgctcaaaactgaaaagatacttcagtttttgaaaatggtttcccacttacaaatatgtctatgttcttttcagtattttggtgtggaaatggaattgtaaatgattgttattttcttttctctggaatgcagtgatcagttgacagtgctttgctatctgtctgattttcaatttctgtttgcctatgtttaaacaggacaaggtgttgtgttggagcgctccatcttcagtgactttgtgttcctggaggcgatgtacaaccagggattcatccgaaagcagtgtgagtcagcattgcagacccacttctgggtgtgtggtgcgactttgcaagggctgtgatagactcaccttgcacttactgtgtttatgaatgtctgttagatagatgaataaatgccattacttaatcggtctccgctggaaaaaggaacttcctaagtatcttccaccctttctccctcctgaaataggtgtcttttgtgctgtcatgtctccctgtgaaagcagattggagccctggacctcaaacacacgcagcttaaagtgcagcccccacagcctcccgttagaacctcccccgctcttagcttgccctagcaatacctaggctgtagctctaattgtaacagactttccagtttctagtgtgtgattttgatgaattgggatgttagccctgccagttgccagcatcatcacagtgcttccctctgacacgctgccgtttttcaggacagtagctttgtgttgctgtattggggaaggtctgacaagtggcaaatggaaaggaacaaagaccccctggtttgaagcaggctgaccttgaggagtcagggtggggttggggtgtctgtgactaggactgtgttgggcggtgggttgaataggcctggtggacagtctgactgacggcattttcatctgtagactggggtggctggagccagtggaaagctggaatctgggagctcagaggaagtactgttgattaatgaaagaggaggccgaagcaagccaggtgaccattctgtggaggaggcgcctgcttctggctgcttgtgtgtcctggtgttgccggtactccacctgtgagcttgccgcccgcaagagcactgcaagcccgtgcttctgataggggctgatcctccctggacatgctgagcagcgggtcaggtcaccagcaagtgtttctggagtgcctgtggtgtggcaggctctcttaggtgctagggatatgaatatgaagaaacttaagacaaggctcccacgggcccggggttgggggctgttgaaccaatggggatggttcattgtaataaagtgtacttagcactcctgagcattactcctgggtgctttgggggcacataggagaaatgtgtaaccggctgggagatgggatagtgtcagggacagctgttttgatgaatggcctgtcatctgtagcgcagtgggagtgagggacgtgtggggatggtggagaagcctgcgtgtgccacaggctggtggtggtgtcctatagtgagggctgggtgctgggggagaatgatgctggatgaggctgcacgaggaaggagctgcgcctcggcgaggatgcttggcttctgtcctgaaactagtgagggaccactggaggatttttagcatggcagagacatggttagatgtgagtttaaaatggttgcaggccttcatctgaaggatgcatttggtgaggagagacggaaggggaaggagcctatctgggaggaaattggggtgggacaggcgtgcacagcagggaggctgcactgggcagtgggagttgccgctcaggagggacactgggcaggcctgggtgggtggtttcctgtgtgcacagtggggagtggcgtggacctgccctggctagtgggccgctaagggggaaggatgcacaggggcagtggaccgatgtggcttcatgtttgggcgttggattcctgagtgtgaggttcccatggcaaggtggcaggagatacctgtcggcatctgctgagtgtctgctgaagtctgaggactggcctgggctggagtctgcaggcgttgggggtccagcactgaccgtgagcatgctttccttgggaaagcccaaggggtgatgggggagggctgagaccagatcctttggggaccatttctggggtgatgagacccccactgagggattgaagctgaatgatcagaggtgcacaggaggaagcagaggggatgtggggagggttggttgttggtgtcacatgtgctgtgactctgatgggaactgagaagtgactgtcacgtttcacctttcgggggctggtgatgttagccagagtcgtttgagtgctgggctgggggaaagcagatcatgttggctaaaggacaggtggcatagagcaaggtggggaccacctgagaagtgggtgtactgacaggagtaagggtgagggtgggaagcagggtgagagcagactcggtgaagggaggtttcacctcagcagcaggagagaccggcctgctaccggtccagcagtcaggaagcagacccgaggtcccgtgtgctctgcctggctgcgggtttgtgtttgtatgctcaggtgaacggtactccactggcagcctccgtcctttgctttgtcacacctcctcctgggtggtcttccttgttctttagctcgtgccgttcctgaccctgagccaaaggctcatcccacagttgcctctagagtgaggttactaggaatgctcactggaacttttttttttaatttaatttttaaaatttttatttatttattttgagactaggttaggagactggctaatgtttgtatttttggtagacatgggatttcaccatgctgctcaggctggtcctgaactcctgggctccagtgatctgcgcccacctcggcctcccaaagtgccaggatgacaggcgtgagccactgtgcccagcccatttcctttaaagcaaaatagttgtctttctgtggaccctagcatggccatctgtcacttctggaaggttccacacgtgaaaagctgcagaggggatggcttctcagcatggcctctccacatgcactggcgtgcactctctgttggcttctgggaggtcgggtgtgcatgagcatgtgcaggtgcagagtgctctgaagagcggcagggttcccttgggtggcacgggccctgcgggtgccccctggattatgcattctgtgtagtgatcactttaggagaattattcctcagccttagctgctttcaatttcatgttgtcactaaatctgactcagtagatacttctgtgcagctgattatactactgaaacgggataaatgcagcttgatgattttcagctgagttatttgaaaaataaagtatttaaagctgttctttattcttcagagaagaccagactcttgtatctattattactgtgaagaaatatagtagcatgtatactatatacctgcaacatatatactgcaagtatatggaatatatttcagttcaaagatcactgaactgtgacctccatcttgcgtgacctacgtcttgcctcaggagcaaaagtgaacccttaaatgtggctaagatgtgctaaagatctgtcttttaggatgattaaggtcacagtttaaatgctgctgttttactctgtgtaagtagcttaatttctctgggcctcagacctttggtttgtaaatacagtggaggcgacaagccctgttttcagggttgtgggcaccacagctgctgtctgcacatgccccgtggcacctggagcacagtcacatgccatgtgtgtggtcagtgcttagaactgtgaccgagatagggtttgtagattggtacgtggctttgagaattgcgtgtatgtttgcccttttattcaaggaggagtgtgttttggaaacccgtgtggggactggtaggtgacagcgcccctttctcctatgtgccaggtgtggaccactacaacgaggtgaagagcgtcaccatctgcgattacctgcccccccacctggtgatttacatcgatgtgcccgttccagaggtccagaggcggattcagaagaaaggagatgtaatgcagttttcaatcaaaggccaagcatctctattttgaatgcagatcagcactaaaagccctgttttaatagcatttatactaattcctaccagtcctcacgaggagggtgacacacaccctgttcccacttgagagagggcatctgcaggggtggaggggagaccccatggctcggcctggtgccacagcctgcgggcctgccgcccaccagtgctctgcggtcccactgtggtccccgagtcccctcagctgtttaaacttgggaggctggtgagggcctcctggcagagcgtcctccatccctctgtcacgtacctttctgttctctgatgaggtttttgtgtcctatcgttttcttccacattggaagcaatttctaatatccctcatcacttcaatctatttaacgcaaatcgtgcctctccccctttttcttacttaccaattctagaacagtagagcagtgatatccacacacatccatttactctttgtagttttcattggatcttaattaggtggcctcgaagcaacgccttttgaagtgaccctgtggccgttggtagctctgttggcggcttgatggaggatcctgagatgaaacaaagaccgtctttgccctgtggcgagttctttgttttttttttttgagacagagtctcgctctgtcacccaggctggagtgcagtggcacgatctcggctcactgcaagctccgcctcccgggttcacgccattctcctgcctcagcctcccaagtagctgggactacaggcgcacgccaccatgcccggctaatttttttgtatttttagtagagacggggtttcactgcttgtttaatactatgttattttttcctggaggagaatatggtctcctttttgatactgtgatgaaaatgcagggctacctgcctgttcctcactctgatgcccatcctcagtgccggaattcttgtaggtgctcaggaaatacctctctggatggtgggttcttgtcagggcaacagtaaagctctggttattttttgctgctcctgaaagatccatgggactaactttccttctctgttgcaatagtagaaacagcgagatgtctatgtatgcctttctattgccactctggaacttttattgtttaagcatatgcttgtaagtatgttgtatagctagacttctaagaaccttccatcaagtggcaaaaggagggaactgcaagttcaaaatgtttgtttctcagtggactaactggacacctttgcttattatgctgacatttattgagaaaaacaaagtcatacatttaacattctctagataattcttttgttatctgggaaaacagtatttcaaaaataattctgaggtctaaagtagagctgtcaacttcttaatttttccaagtaaagtcttcaatactgtcatcaggtaaaattaccccattttataaaagacatcacattatcagtaagtctgtgttcttattttgatttttatttcaatgcagtctgtgtctcagtattgcaccttttgggaataactgataggaatatccgaaaaccatttctagattctaagaaaacagtcaaagtgatcaataactacatattttatcaagtaacttcaggtcagatttctgagatggttgtgttatgttgcatgttatgggcttatattacactagagtttcttttataatcagttaacatttaatcttattctacttggcacatagctaatgatagagatttagaatcatatcacctcttttatacttttgttgatttcactcactcctctaatacagagcacctcctatatgcaaggcgcctgtgccaggcacctaggaggctgcaaagatgaacaaagatggtctctgcccagacaccaagtccttattggaaaatagaactcccaattactgcctttcccccttttgacagagcaatgaagtgcagcattgcctgtatcatcctttccctgtgccccgtcgcattactggaattaatacatgttcagtaaatattctttgaatgatagggtttttcttattttgaacagctttaatgaggtataatttatgctccataaaattcacccattttaagggtacgactgaatgattttgggtaaatttaccaagttgttgccactcttgccataatccagttttagaatgttttcatcattttgtaggttgaaaccgcaggcctattcatttctttcttccttcctctctctcctgtaagtgttgattgagcatccaccctgtcctagaccctgcttggtgctagggacataccagtgagcagggtggatgaggtcctcacccgtgagctcatatgctgatgggggagacctacagcaagcaaggagataaataaatacatcaaatagaggtaaatgatgtgaagaaaacaaaacgggctgagaagatagtgtgagactgtaaggagttttaaattttaaaacttgctactcataattagatattcaagtttctgaaattcgcatagtgcatttcagatgatgagagaggtgacagccgtagaaagtgggagaagtggttgcggggagatgggtgagcgatggaggtggcgagcaagttggagagatgcagggagagtcaggtgacaagaagagagtgtgctgaggacagatggcggacagacaggccgctgcccccaatttttggtgctctttcattcctgcactcaggcacgaggcagacaggaaagacaggcagtgctgcttcgtaacaggcatctttcttgccctaagtatacatcttagaatgtgtggagaaagtcacgctatgggagcacttgggcaggctcaggtgttcactgtagtagaaggagaatgactctagctgatgttgggaccctttgctgtcaccccgcagtccccacagtgcccggtgtgagttgtaagaaaatggtggtcagtgattgtcttcgcattttatatacgcacaggtcaaagagaatgaactctaaatgtttcccagtttgatttttctgcttctgtttagccacatgaaatgaagatcacctctgcctatctacaggacattgagaatgcctataagaaaacctttctccctgagatgaggtgagccaaacacacgactgatttacagggctaaaacttcttcgccactcgtttcttaggccccaacagcccagggagttttctgtcttatttactgcagtggatattgtctgagatgtttaatctgatgtttataaataagaaaaacaggagacatttcagtttgatttttgtggggtttattggtttatttgttttggtttgcttatcttgtcagtacttttgctctgctatatttctgaagttttttgatgctagaagtaaaccaagctctattccatgacaggttttaccatagagaacttgtgtatttttacttcaggtggcaactaaacattcgtgtttacctagaaggattgattggaagtgtattcatggagaaaattcatgaaagataacactttctctagacattcttaattgatgtccttgagagatgtttggattagatgaaggaaacaccaccagactgtttttctttcttttccccctttctttctttgttgaaagcacatggaaaatgtggtttcactcatcctatggcttgtcattctgcgctccttgggtatattcgtgtgtaaggaatgtctgccacactcattcacgtccagttaaactcagattgtttgaataatgcttgaattgaagatttttatactatttctcatactttttaaaaccctaagcctctttcggtgcctaaaaatctcatgttcttgttgtttaaaatttcaaagtaactgaagttgtgaataaaaacaaaagtatagcaattttagaaaaaaagttttatttttacatttattttagttaaatactgaatatttacaatgaacagccttagaagataatattgttagaccataggtaataataaaatcaaaagtgaataagagaaatgttctattcagggagttttttctgtaccgtaagtattaacgtttatgtcatctctgcttgtttgtggtgagcgtttctttcttaggtggtaagaagactgggtggcctctggcttccttttaacctgttgtactgccctatttccaaggccacaataccaagggaagtatctagagccaacgtgaataaacagcataaacagagatagttgaccctagagtttcaggctcaaaaattactcttggagatcttctggcttcaaaaacatcactgagaaagagctttgtcataatttctcaaatggagtttctagctacaacatcagcaaaataatggctggtttcagcctgtgcacagggcaagagtttcttttactttgccgccctcatagactcgttaagcctcaagcatttatttcttaccacttggtcttgctgtgtttttaactcctgttttaggaacagatacagtctctgttcattgttaaagtagatcttatctgacagctcaagccgtatggattgatgggagccacttgatgtaggggtcatttgtcacacattgaagaatgagtaccagatgtactctatgcagtatgcattattttaagtgctgaattgtagaccaagatcaaactgcagctttgtgatggacttggatcttaaaagttttctcatagaaattcactatgaaatttggctgaaactattttttgtaaaattgcaagaaacctatgacgagttgtattttaaaatttattggccattagcattttagaattcaggagttattttccaacagaaacaatattaggtttcccgggcttgtatatttaaaccattgtttagttaaatactgaatatttttattgttagatcttaggttagaccttagaagacaatattgttagatcatagataattaataaacagtaaaatcaaaactaaataagagaaatgtttttagttttaatactagtatttgaaataaagcagattgacctgacaagatgatggctccgttgaagttctgtgtctcctgtctttgagcagttcctcctgtgttagcccttctctctgtcacgtgctgatacatggtgatgcttcactgtttttgtatttgttgcttatgaatgcataaagagcattgcagccttttccaaaatatttgtattgtgggattttaagaggtacaatgagctaactctcataggaatgtgtattttctggctttgtcaatatttatgacccagatcttaggcgtacatgtctttctcctcattaccttaattgtgaatgtgttaatgagtatcaacttagtttcaccaacatttggccattcccgtgttcaacatatacttatttactcagctccaacactgctagctcccagtgtcagtgttagctgagacacagaggtacacaagacagagtagggaaggcctttctgagaaagaatcgtcacctctgagatttcagagacaagaagaggagcactgagtgaccagcctgacatgtagcgagttttgtaactgtctttattgtttcagattgttctaaggtgggtgaggagctggggaggctctggaagtattgaaataacttgggggttcagtaatacagcttgtggctctcctcggccctgagctacctataggaataaccaccattgaggttgcacgtgaactgctggcccagccctttatgggggtttcctccagatccctgactccacacttgataccttcttattttaggcctcctttcacaaggcagtgggaatgagaggcaggtgtgactggacggaggcggttttatttgtctgttgccgaggttgttagcatgctgaatggaggcgcacagaagatagaaaatggactctccaggttgctctcatcaggtagtttggggtctggagctcattaagggcaggagccctgtcttccccaccttccataccccacacagcacctggctcctggtggggcttcagctaatgtctgttcagttatgtgtgttgaacgaaactgtcacatcgtcctgatctctcatgaccactcttgtgcaaatatgtcaaatagtttgtgacctttcatattgctgtgtgagaacaaataatgtttctgtgccagccctgttcatcagggatgtttaagacctctgtctcctatacacttcagttgaatattcacttaggtgacttgcagagggaattattctcctttgtcactttgtgcctttctcttcgtattaacaatgggtagctgtagaggttcaggaagcaatacagcaagtcctgtaattagtgtggccttttccttgccagccctaatggcaaatgcagtaagttactttcctcactatggatttattgttcattctgcttgcagtttctgaccatttatgttgatcttaagggtgctgtgaggagtgcagtgatctcgttgcagtaagaatctgttatccagttgtatgactctgaattgtgagttatagacttgtgtggaacagatgtgttactgagtgattgtagagcttgaagacttttttctttttcctacactttggaagtgatgtgagtcagtaatgatgagacttaataaaatacaagcactttacctgtactacgtaatttaatcaaccagtggtctgttgaagatggtcagcagagttggtgaagtttgtttggtaccattgtaggggtcagatgctgatttcagtatgagaataaatagcttgtacattcttggagtatttacttaccctgtatgtttacatcctaaatgtgtggagggtgctctggtgtaaagatgccctctgtgcctgtgctcatttaggccctgctgtggagggtgctgtggtgtaaagatgccctctgcctgtgctcggttaggccctgggctgtggagggtgctctggtgtaaagatgccttctgcctgtgctcggttaggccctgggcttcgttgtccttccgtgcagcgggcactgcctttggcgatggtatgtgcagctgctgacatggctcatgtaccttgctcctgtggacagtgatggctgtggtctgtcacgcccttggcttgggggcagtgtagtcaggagaagggaaacgaggaaatggtcctgctgttgtcactgtcaagccagccatgagaacattctggcttttaacatgtcctcctgaaccagtcaagctctaatgcaccctcacatgcccagcacaatgcccagtgcagagaatgtgaggttttaaatttgagcaggagactttagcggtatgtattcatttgtacatttaacttcagcttggaaaagtttacactgaatttcatcttgttttttcttacagtgaaaaatgtgaggttttacaatattctgcaagggaagctcaagattcaaaaaaggtaagaaaatggttgaaaagttgaaagttattcctacatttgattcatgtgtaaggttcttgcaaatcagatcgtcagttagattcccactggtcttaacaaacatcactgttttatcacctgaaagcagtgccagtcaaacccatcatcacactcccctggccatgaggtttcgagtttctttcaagtaattcggtttctacgatctgaaaattacagatgtcacagaatcttgggtcatccactctaccatttttattaaagagatggaaaattgaaagttggattagttaatgggaaagatttacatgtaaagataacagttttccttaaattcgtgtgttttgtgaaagtctagtaaatcttggtgtagttttcagggaactttatgaataacagccagacaaacattaaaacatctgaagaagaataacgaaagaacatttgccctctcacatacaaaaacaaactatacgattgtagtaaggagagcattgtggtgttaatgcaagaattaataaagagcttaatggaacaaaacaagagtccagaaacatgtatgcacctgtgtgtaagtatcttcagtttggcaaagttagttccttaaaggataattacaaaaatgaagtagaggaaaattgtttcctaaatggtactgaggcaactgagcatccatttgttaaaaaacaagttttttattttgtattttatatattaagcataaattactaaaaacaaaacgaggtgtaacaattctagaagaaaatacaagttttaggatctggtcttgaagtgtgagtggtgcccgtgtaacagagaagctttgcatagttggctgctggggtgacaagcgtgcttcagttgcctctcagcattgggagggtgagaagagggaggttgactgagcttttctgcacagagagtagcattctccttgcagagggaagccctgcattctcgcccaggctctcctactaccagttgtaaagttcttttgagaccttggtttattctactcagactgattaaattacatttcattttctcctccgccttctgtttctgtttttagagtatttatatacctttgagagactgtttaggtggcatgtatcttagaagaagaataatacgttttgtctccaatactatgttatttgagttcatttttgaatttactcaaattcccgaaactaaagagggttcatgagtttggcctgttgtgaggagagaatgcgtatggaaagattactcctctggaaagtcagactgtgtagacagccagccttgaggccgggcacctagatcattaggtctctctaggtaatgggtttgtatcttattcttttgtcattttgaggggctaggttttgccttttagaaggaacttacttgggaagaaatgagtagcctgtcctgaaggctgatttttctcccctagtcttcattgttctcacctgtccttttctcccagcctgcagggtaatgtctgtcctacttgatccctgagtgttagctaggcaaggccatactgtgatgcaacactcaaccccaccatttcattaaaggtcagccagcttcacttccattctgactgttacggtgtgattcttcctgccaaatattcatagcttataatgtattaaaatgttacctcttggccagccatggtggctcacgtctataatcccagcactttgggaggctgaggcaggaggatcgcttgagcccaggagtttgagaccagcctgggcaacgtggtgagaccccatctctactaaaaatacaaacatcagccaggtgtggtggcatatgcctgtagtcccagcaactcgggaggctgaggtgctgaggtgggaggattgcttgagcccagcaggccaaggctgcagtgtgctgtgattgtgccactactttccagcctggatgatagagccggaccctgtctcaaaaaaaagttatttcatttaaatttctaaaatggggttctctgtttaaattggaatttttcctgtcttaggtggtagaggacattgaatacctgaagttcgataaagggccgtggctcaagcaggacaatcgcactttataccacctgcgattactgtaagtgcatctgtgtgggggctgctgcatgtctggggtctacttgcatgatggggaaacttagggaagtttgaaataattatgtttcaagttaggtgttagcagcaccaacccaatacttagaggtattttttcttccaaacagctcctgaatcccctggtctgatacttaatttattgagtgccattattaatttaacaggcattttgcttccactatgtgcaacaccgttccagatttaagagatatagtgtcagataaaattcttgatgtctttgaaaatgtgttttagtaggtgagacagagtaaacaaatagataaaactgcgtcaggtcacaaaggccagggagagaagtaaccctgagtaacagggtggtgagtagctaggggtgacaaagggcctctctcgggatgaggcctaagtgaggccaggattgggtcctgtgggccgtggggtgagcagagggcaggggcttggcaggtgcagaggctcttcaggcaggagtgtggtgggaaggtgcgcccagcagccaagccagtgtggccagaaaaagtgtggggaggggaggccacagcggaatggagcaggactaggagaggaggccatggcggaatggggcaggactaggaggggaggccgcggtggaagagggcaggactaggaagggaggccactgcagaagggggataggtcttggtgcgtttggtgggttttcttctgatgagatgagatgccgtttgggggtttgaagcagaggagtaatacgatatgacttatatccattcagctattgtgtggattctttggtatctattaaatgaaaaacaaaaaccataccgattaggtaaggttgaaaaaagctgtcttcatctgcaccactctattgaaactgctcctgccaaggagacggcctcgccattccagatgcggcagacccttgtctgtcttcatgctgctccctggccctggaagcagcaccgctgcccctcttctccactcccttctcctggttccatgccctcctcctcccccactctctcactcctccaccagctgctgccttctggggccgggctctctttttctggttccttctgcctgctgctgggctctggcaggcacagtgaccccgggcagtgtctcgtccgttgaattcagtttcttgaggacgtacctagtcacacagctgtggatagcgtggataccaccgtaggtcttggcccagacctttaccctgcacacccagcaaatatccctcggctgcctcttgcagtgtctctgtgcattgaccttcccaccggtgatccccagctctgcctcttctgtcctggctggtgctggccacccgggaatctcatcctgcttgggtctgtcctccaccacccaccccctgctgcttctcatcactgcaacgcccagttcctggtacaggcctcatatccagcgtgcactcaggagatgtatctggagtgagtgactttgatttcttttagggctataaattctacaaaattcagagatgattttgtaatgagaagtgctgttgtatcataattctgattatttataaatcaagattggagtaatttgagggtctttgacttgtgaaaatgcaggaaacatgagtagctatttggggatctgccttttgtgttaagtctcgagcccttggcctgagcctgccctgtgctgcttcctgcctctacccaggatgctctgtgcagactgcaccaacactttgcctctcgagggcctggaggcacaaggatggccggggcactcaacttccctctcctcaacgtttggatgtaaattaggaagttggtgcctacagatggcagctctgttcttggccctgtgatgttggtgttcttaggccgttggtgcttaccttctttctctgcctgatgggatgtgagtgatacagtagtctcctaggatgaccagagggacagctggctcactgcacatgtcactaaaagttcactgatcaaaatgtaaacagaatgtgtaataagtttacttctggccaggcagcgttcacgtctgtaaacccagcacgttgggaagctcaagtgggaggattgctggagccccggagttcgagaccagcctgggcaatatagtgagaccccatctctacaaaaaatttaaaaattatctgggtatggtggtgcatgcctatagtttcagctacttgggaggttaaggtgggagggtcacttgaacctgggaggttgaggctgcaatgagctgtgttcacgccacggtactccagcttgggcgacagagactctgtctctcaaaagaagttcacttctgtttgatgtttttagtacagcattaataagcaaaaaataggtttacattaaaaaaaactagtcattctacttagtttgttaattcctgcccccctgttaaaatagtatttgcaaaatcagttttctagttagtggaatggatactgaagggtgagcaaggtaggcacactgtggggtcctcatgtcagactgaggagacgggaagggtcaggtcagcccttagctggctgtgtgacttgggacaagtcactttatctgcctgtgcctccatatgtaagattatggcagtgaggtagagtgctaggccatgtgtattgaaggaaaaaacaaatataaatttcatatattatattccatatactgactactgtataaaatggtgttaatctaaaagtagcttactgaaatgattggctctctagaaagtcttttgaaaggaatctagcaaatcttccattagaaagtaaaacaaacaacaaaacccgctttccttgtcttttttttttttttttttttttttttgagtcagagttttgctcttgttgcccagactggagtgcagtggcgcaatctcagctcactgcaacctctgcctcctggttcaggcgattctcctgcctcagcctcctgagtagatgggattataggcatgcaccactatacccggctaattttttgtatttttagtagagacagggtttcgccatgttgggcagactggtcttgaactcctgacctcaggtgatccacctgcctcggcctccagaagtgctgggattacaggcgggagccactgcgccggccttccttgtctttctgagccattactaggagatggaagtaaagcacaaagcactgcttttggcctctgaataaatattctgcatcctggagacaatggccaagggttacagtgcctactccaggtggacaacacatttcaacctgagggccgtgagtttgctgattgacagggcgaccgaccagaaattagaggggtcctctgaggtgtctgaatgtagaagtttctctgagtcattgaagtcagctgattattccctgtgcagccatttttgttgcaaagtcagtgtgtgctttgctgtgaactgtggcaagggccatcaaacattggtttattccgagtaattttaactttaggacagggatgcgtaggtgatggagaccaagaggagaaaataaaagtatatttctgagaagaaaatgattgttgtaataccagagactcaccatttcataaccaggtcagaaggatcccttgagagggactcagccactcacctgtcactgtgcccctgggcaaggggcctaacctctctgagcctctgtctccttgttgtaaagcaggaagaaaatagaagctacctcataggactgttgtggggattaaatgtgggaataatttgaaaggctcagaaccatgtgtatatatcataagtactaaagttttagggactatgttatgatactgtttatggtatattattatactctgattgtagatgcatgatgtgtttacatttctccattaatatttttgttctttaatactaagctttttttcttttactttttaagtagtatttttctgatcttagaaataatttacattaattatcctcaattcacgctttatggaaatctacagtgaagttgaacgaacccacctcctaaagacaaccgtgttgaagatgctattcatatttttttctgtgcatgccccagtgcagttgattgttgtaagccagattcccagtgtgccctgccccttggtgggagagctgaccttccgagtgatgtgctcaccacccttgcaggattgagcaccacagggcttagcactgctttgtgtatgtagttctgtgttgcttaacgacagggatatgttctaagaaaggtgtcgttaggcgatttcatcatcgtgaaaacatcatagtgtgtgtttacacaagcgtagatgctataacctgcacacctaggtggtgtggtggagcctgttgctcctaggccataaacctgtacagcatggtacagtactgaatactgttggcagttgtaacacgacggtaagtatttgtgtatctaaacataaaaaataatatggtataaaaggtgaaaatggtccacccgtctggggcatgtaccgtgagtggagctgacgggactggcagttgttctgggtgagtcagtgagtgagtggtgggtgaatgtgaaggtctaggacatcaccgtacactgtggtagactttgtaaacaatgtacaattaggctacactaaatttatataaaaagtttttttcttcagtaagagattaaccttagcttactataactttctttataaacttaaatttttttctttctttatatccttattctagaagtattttctgatttttaaaattatttatttttactttttaaacttttgttgttgttgttgttagttaagatacaaacacagtggcctgggcctacctggagtcgggagcatctgtatcactgtcttccacctccacacctttctcactggaaggccttcacgggcagtaacacgcgtggagctgtcacctcctgtgacaatgatgccttcttctggatgccgcctgaaggacctgcctgaggctgttgtacagttacttttttaaataagtaagatgagtactctaaaaatcacgatgaaatgtctagtatagtaaataacctaaagcagtaacatggtcattgatgagaatatcaggtattctgtactgtacataattgtatgtgctggactcttccacgactggcagtgcagtaggtttgtcaatgccacatcaccgcagacacgggagtcatgcgctgagccacggcgctgtgacagctgctgtgataggaagtgttcagctccactagaatcttgtaggaccacattgtatatgtgacctgttgtggatggaaacgccatgctgtgcataactggaaaccggcaggaacctgtcacatggtacaaacaacatgggtttcacaggaaagccacgggaaggctctgttgtgcactctccatcagtataactttgtgaatttgccgtaacatttccattttcccaaaattcagctttagctgcagctgtcaggttcctcgtaggaaacagatggcacatttgaccagagaacagaagagagttacgtaaaggaaccattgataaagagcagggcagggttgagggaagcaacaggatggtgagacacccaggccatccacagtgggaaactggcagttgagggcgggggcactgggttttggagtccagagctgctgctgctgctgctatggaagaggctgtccagcatcagatggagcccgagggggatggggaacccgcatgcagggaaccagcagaacaatcatccacccagctgtgcttgaagtcagagggcagtagagcccctcggatgcaaggagccagcctctgggcacagagcaccttggaggaatggtagagaggagatctaaagggccaggtggaaaacagccccagactgtccacccagagaatgcagaggacggtcggcattcaccgttgttccctgtccagaatgaaaacgtgcatccctacgtgaaacaggggcagccaccatgtcattgtgcggtgatgaccattcatagtcttgagttggtcactgcaggtgtttttcatataaagtagagggagaaagaaacaacctgccacagaattcctggagtccccgcttctgtggtgagttcggagacccaagttcactttggtagcttccttggttcccacagcctcctcccctctgccagcagctcagctccatgtggtccttacctggtgcagcatcctgagcctgtgtgctgtgggttggagccttgggggctccctctgtggtagctgcctatctctgttcagaataagatttatcacagtgaatgaggacagatacgcagacagatcaatacaaaaaaagacatgttggactctggagaaatccatgcacaggctcttcctcctgtgagggacactgacacattgattgagcaactttctcaagcagtgaaaaatacagtaacatatgggcagtatttctgcctggaaagccctttagacactcactgcccgtaatttttactgggggctggtcacgtaggaatcctctgcttcgcaactactcaggttccagactcccagaaagaaggcaggtgttctccataactcccatcgtaccctggtagggctgagtttgctgcccagcctcattagcatggggcactttttagaagctgagtttccagaagccaaccaagggccagcctcgcaaggaggccctgccacagacagcagcataggcctgctctgtgtgtggcgaaggaaaggctttctgagagcgcaagagctgtgcttttggcagaaaaacttcaggcaggggaggcaaatccgaacctaggagatgtggttttttaccttgggcagagcctgggattttaacaggactgaggttttgtaagagaggggcaagggaactgagcacagacaaaatcgcatgtgagtagtggtgaaccatgacgcttagtctgggtaaggaggaaagtgaaggagggaggggtgaggggactgaaatgacaaagtggatgagaggccaaaggcacaccctcttggaagagaaagtcgggaacaaaggttgaatatagaatcaaatcacctgcgcttctgccaccacagtgccaggattaacagttgaatgcaggttcttccagtctttaaatatttgtgtgtgcatatatttctaaatatatcttgtgtgtatttttgtattctacttccaatattttgagcatgttcctgttttgttaaacattttaaaatttgattttttcatggctccccatatatgctgcacttaccattgattgagatgcaaatcagggcttggcaaactgtttggcctgtgggccagatccagccgtcagctgctaagaatgatccttaacgtttttaaaggattggaaggaaaaggaaggattatgtgatggaaactgtatatagctctcaaagcctggtatttgctatccggccatttacagaaaaagttttgacttctccgacactacataatctgcataatttactgtttctttaaaatagatctcttggattatttcagtttcttcatgttcataatacagtaaagagcatgtagtaccccttcttgttcaatttcaggttacttaaggtataaaagtggtcagagtatatgaacgcattttacagctattgagtttttgcaaaatgattctccggaatatgtgtaccagtattcatacttggacctggttctctgaatttccctataaagaatataattaaacaaaatgcaaacaaaaactttcgattctgatacccatacaagtatttgttttactttgcattttataaacactaaacttcaatttatatttttattggctatttatttgctctttgtgaattttcccttcatatttattaactttttcgaagaaccaggtttttgttttgatgatttatccagttgttttctgttttattgatgtataccctagttttattattttttctctgctttctttaggcttcacttgttctttttctatagattcctaagcttattgactttagatcttttttcttttctaatatagtcagccctttgtatccctgggttccgcatccttggattcaaccaaccttggatcaaaaatatttgggaaaaaagccaataaaaataacacagcaataaaaaaataataaaaatgtaaaaatacagtataacaactatttatatagcatttacattgtattagatattataatactatattattgtattacattgcattaggtattatacatactctagagatgatttaaagcaggggtgtccaatcttttggcttccctgggccacattggaagaagaagaattgtcttggaccacacataaaataacactgacgatagctgatgagttaaaaaaaaaaaaaggcaaaaaaactcacaatgttttaagaaagtttatgaatttatgttgggctgcattcaaagctgccctgggctgaatacagccatgggttggacaagcttcatttaaagtgtgtggggagtgtgtgcatagtttatatgcaaatactgtatgattttatgtaagggacttgagcatcctcagattttggtattagtggtggtctgggaaggaagccctggacaacagaagaatggttgcatatgcatcagtgctgtcagtttccctgtaggtgctgcttttgctgtatcacacaaatgtggataagttgtatttttattttcgttcaaaatgttttaaaaaatattttgagactttttctttgacccacatgttatttagaagtgtgttgtttaatctccaggcatgtagggattttctaggtatctttctgttgttgatttctagtttaattctcttgtggtctgagaatacactgtgtatgatttctctccatttacatttattaaggttttctatggccagtgtttcctatcttgattagtgttccaattcagcttgagaagagtgtagattctgctgttgctggagtgttgtataaatgtcagatcgagccgattgacggtggtattcaagtcatcggtatccttactgattttctctctgctgggtccatcggttactcagagttggggtcatcggtatctttactgattttctctctgctggatctgttggttactcagagttggggtcatcggtctccttacggattttctctctgctggatctgtcggttactgagagttgggtttaaatttccaacagcgctggatttgtctatttctcccttgggttctattagtttttgcatcatatattttgaggtactgttgttaggtacatagtttattatcttaggttattatcttcttgaagaattggccgctttatcgttatgtaatgcccctctttttcgctgatgtttgtccttgtttgaagtcagctctatctgaatttaatatagccactgcagctttcaattagtgtgggcatggtgtgtcttttttcctcttctatctcgagtctttagttttcttgtagatagtaagtagtaattgggtcttgtgttttaatctactctgacagtctctgtcttttaattgctgtatttggaccattcatgttagaagtgagcgtgaagataatcaagttccattttaccatgcttttccctgttttctgtttgctgcatttgttgtttctccctgcctctttttctgccttctctggatttcattgagcattttataagattctcttttatcttttcccttaacatcttgattgtactttaaaaaaatgtttgtagtggttgctgtggagtttccagtatacatttacaacccatctaggtctacttcgtgatggtgctgctgctccatggggctgcaggtaccgacggcacagtcttcttggctcctcctgctgtcactgtgacatggctgccattccttccacttttttttttctttgagacagggtcttgctctgttgcccatcgcccaggctgcagtggcatgatcttggctcactgcagcctccccttcctgggttccagcagttcttatgtatcagcctcccaagtagctgatactacaggcgtgcaccaccacacctggctaatttttgtatttttagtaggaatggggttttgccatgttgcccacctagtcacaaactcctaatctcaagtgatctgcctgccctggcctcccaaagtgctgagattacagacatgagtcgccgcacccggcctcttccactttttataagctataaaatcactcaattcattgttgctgttagtccaggaaaggccattgattttcagttttttcttattggaaggatggaaattacagcttccagccttcaccctttggagctgaagctggaagttccctctttgttttttaaaactctgttaacattttggactagatgcctatatttgtgtgtgtgtttgtaaatttacctaaatgatatactctattattcaaaactttgctttaaaaaacctccaccttctctttaaactgctctattgcagcggtcccaaacctttttggcaccagggaccggtttcatggaaggcagtttttacacagactggggcggggatgggtggatggtttcagcatgattcaagtgcgttacatttattgggtactttatttctcttattattacattcttatatataatgaaataattctacaactcaccatgatgtaaaatcagtgggagccctgagcttgttttcctgcaactagatggtcccatctgggggtgatgggagacagtgacagatcatcaggcattagattctcataaggagtgtgcaaactagatcccttgtatgcacagttcacaatagggtttgtgctcctgtgagaatctcatgctgccctggtctgacagcaggtggagctcaggcagtaatgcgagcaggggaatcggctataaatacagatgaagcttcactggcttgcttgctcacctcctgctgtgtggccaggttcctaacaggttgcagaggtttgtggcccggaggctggggacaggaccctgctgaaccgtgttttgctgttatgtctgaaatctcatagttaacagtagatgtcaacacagcgtctggaaggtgtttcggaaataatttgtctgttccacagcacttctgtggggcgggactccctcattttacaaggaggagaccatgactcgagagctcgagcctgccaaggttgtgtgactgtgtggggcatctcacctctcgggctgcaggagctagagctgctgctctctgcatcctctgtgtggtcctgtgccctgggccatcttgccttccctcctgccgtctgttcaggcttgaatcctggtggaacctttgactcctctgtcaaccataatcctagcttgaaccctcctttttccctgctgacccccttatcctccccaaagtcacaccctgcaggtcagtgtgccactttcagtgacttctctcccttgtctctaacactgctgctccccttggtgtgtaatcccctggttcttggtctctgctcctctgcctctttatttcttcatcccactcccaccaggtttatttttttaaaaagtcacagtgaccctgttttctctttacttgaatctttgagtggcctatcttcatttagtcataggtctgaatttcctttcccagaattaattcagaatcccagtctgccctggttctgcgtcttctaccaggataccaggcaatctgccaggcccttcttccaccaccacctgcccagtagttacctagaaatcctagcagtctttaaagcttggacgtaatcacccttttttctccctgacaccttcccttaactcttgtaggctgttacttatatgaatgtatatggtatccttgtttgttagtattagctactgctgggcatcatatgacatctaacaaacttacggagacaagggattgtgtctgacttgacctccctgtggtaacagtgtcattttctaaacacagtgtgaaatgtgtgttggttcgattctgcaccattcatgtagttatttagttatgtgcttatcggagcatagagaaggatcctgtaattcccccatagtgtatcaattatagcattccgttgttttaatctagctcactatgaatggctttgtccttttttctcctggtattttgcctttcttcctccccaaagatgtttcataagtttacaatatcaattgtgtttattttcatttgagtaccatttctcaattgagggactcaagtgataattatgaccaattttctaacataattattgtaaacatgccgcttaccagtgacattcattttatccataacctgaccaaattattggtttagaacatttctgcaccatctcagttacgtgttgccagtgtctaattatgtgtatgtgtatagctatgcttgtgctgagaggcagtaattgtatttttcagtcttgttcatatccacatccctaactgactggcgcctgcttgggctggtttcagtccagtcaggacctccgaggacacgtcaggcctccagctgtgcaagctcctctcagaccatccctgcttctccagagcccagaccttcacacccaccttctttttgcttaattgccaagatttttacatgactcctggagcacgtctttttaacatgaaatttcagtgctacagaaactgtagcatgtgagtttggtttcagaagtacagtgtttcagatagaactttgcaattcaggagaaactgaaaaatagggtttggaaatgttataggacaaagtgttgacattcagttaattgggaaacagcttgagtcataaaacactatttacaattttattcttttttctgtgttcctgccttactcttgttttaaaatacgtgtcccagcacctcatattgtaaccaagctctagtatattttatattcttctttagacagtgacttatgatattaaaaggatatattatcctcaatcagttttgaattcttcttaatgaaactaagtgctttgtgaagagaatattttctttcactgccttttgcttcctgagtcataaaatgattccttgtatctttatttcttacttaaatctaggagtttactggagatataccatggactcttcctagtagtcatcattaagctcatagtaataaattgaaagggtagtttggttaggtataaataaattgtagaatcattgcaacagattctttttttaatcttcaaaaatagtttgaagcctacttgttaaaagattttccgggactacatgtaatgttgccaaattaagcatagatggcgctgttgctctctatactacacatggtccaggccactgattgctttcgcattttgctagcataatcttaggcttttcaaactgtaaagagaaccatgtcacctccctacattgatatttgttaacatttaaaatatgaacttcatttttagttggaatttcttattgtgagatcacttcaaaaattatccttatatttgtgttaacagtaagaagatacgtacttgtagattattgacacatgcatggaagtgtttagatagaatgcataaggaaagctagcagcagtttcctctggagagggaacttgtagtcttacaattaatgcagtcttacaaaatacagcaactttatgcccttcacaaactttctgttttgcttgcttgagtttttaaaaaatatttgcatatcttttggcaagtaaaaccaacttaatagtaaaactaagaaaacgatcttatctgtaagtatgtacattacagccatttgcctacccatgtggaaacgcacataaatacacttaggaaagcaaacgatcattgttatcctggcagcagtttcttggaggggcatttgcattattggatcactaaccgtgtatgagcgacgcggtttttactaggacgctcctgacgctatacctaccgtccactcatcttcagcttgccgcaggttcgcagctctgtggctgtctgtggaagcatgattcatggatcccgtgagccttgggttctggtcaggttgttctgtttgtgggagagcctacctgggtactgtggggaacaggccgtgggtttgctcagtgggcctggactgtctcacaaagtctggccgagagccagatacactcacataatttccatttgagccattacaaatgagaaacgtctcctgcttttataactcagtaatgggaatgtgactgttgaaaataattattttctttgttttgagcccttaagaaaagagactttattttaatgtttttttttccaaaagctgaaaaaatgctttttaaaaatctttaagtatagtggttatattcagactatatttaatttaaaataagcaaattgtaacaaagtataaatattttaacattcagcaaaatgaaatgataaagctaagagactatcctatgatttgtatatttattggtgccaagaaaagtggagaattagaccttttacaagccgtggtacaacagaccatcctatgttggcctcagcatacagaacagagcagtaagacgctggctgcaaccccagagggactgaagctactcaccgttcctgccccaagatccactcatctggaaaattgttaatgggggcatgctttgtgtgtagcactgtcatgtaaccatttgcttctagctttttgttcctgctattcctgtgtttaaagcacactttgcctcctttttctatgtctccaaaacagcatccattcccagaaggtcgtcctatgtaggtactgaggcttttaaaagatgctacctcaggttctgagagtaatattaaaaagcagctccagatcgaccatgtggtctttgggaggaaggctttgctgctgggatgattgcttggcaacgaatagcatttattgggatatatagattttttatatggatgtttaaaaaaaatcggacttacacttcttttattgtatttattttgatggtttggtgtgatccacatgtgtcttattttttagggttcaggataagtttgaggtgctgaattacacaagcattcctatctttctcccggaagtcaccattggagctcatcagactgaccgtgtcttacatcagttcagagaggtaagactgtggaaatggagaaagctggccagtggatgagtctgcagcacctggggacaatgcagtcacttctccagaaaggagtttttgttgttgctgtgttttgtttgttttagtgaaggagcctctttttcattgaaataattctcccttttccccgtatttctgtgtggaaagctgatgaagtcctcagatgacagccccagagcagagatgttcttctggaaggttcttcatcaggcatattatcttgataggagaacactctgttcatcagctgttatgtcagtttctttactgtcagatgttacttctggtattttcttactctttgtctgtaaataatgagggttccatttctgcagaaggcccttaggccatatgggaggacatagggagggcaggcagagcttgggacagacagcgagggtggaagttggtaggggcaactgtgtcattgatcttcttatccaattgccataccttcttagtgagttatttgttctggcaagattccattaggttcgaggcgtgtgtaagtttcgctgggaaccagcgggtgagttgcagcctgcactgcaaatcccaatgtcagtggactgggaagagcacgatccatatccgcggcagtggtggctgtggtttgttatgggtaaaagtgaaatagttgtattaaatcagaactccaagctatgccttcaacatgtagatgagttgaaatctaaatctttttgcattactataatcgtctgagttgatatgcagcaaattgcctgaagcacccactgaaagtctgagtagatccccttgcttgctttcttactctacttggcattttctattaagtaaattttttggattgttttggaagtggttttattcagtgtgaggatttggggaaaacacataaaaccataaagaatatctctcagaggccctgcggataataatctgtgttcacctccttctgtcttggggatcctctagtgtcgacttcnnnnnnnnnnnnnnnnnnnngggtggattcttccctgccctgacctgtagagggggtgtgttcccctccggcttaaccaggtggaagtgggctttctcccttctggctggacaatggggtgggctgtttccccttctggcctggacagggtggagtgtgttgctgttctcctttctgtccttggacaggtgggtagggtgtgtgctgtgttcccctttctgtccgggaacacgtgtgggagggcatgtgctgtttctccctctttgagtggggtctgcggatttgctgcttccttggcatcaacgctgtagctggtgcttggctgctgctcttgtgtagcccagaaaacccacacttggtgttcgttccctgtctctgcttttgtgagtggccaggtcctgttgcgtctgtttcacaagtggcttcgcttcttcctgttgacctccaggctgccatcattcccacctgagcttgttcggcggcttcctcttggtctccttgggtttagtctctgccctcagtccttctccagtaaggcagaagcagccgtgatctcaatgcagaacccaccatctcagtcctgtgcctgaagtccttcctttcctgtaggaggtgtgttaaagtctgccactctttgtggatttgtgccccctttccgttttgtgagattttgtctcatgtatgttttagggccgtatgattagatgcgtaccaatttagaattgccttgttaggagggtcacccttttcatgatgatgttttcctctttacctttagtggtgcttcttactgtaaagtttattcaatatttatgtagcatctgaaactttcttttggttagtatatgcatgatgtaactttttctatgtcctttaatttcaagctttctgtgtctttatattcaatatggataccttgtaatttgcagttatttttaaattttttattctgaatatttaggatatttatctgttcacatttaatgcaattactgatatatttgtaaatagttatcttactgttttatattttttctacctgttctatgtattttttcttcttttttttctttattccatttaccccacctatttccctactactagttatcattcttttaatagctttttgttactaaactgataattaaaatatttatctttggtttaatgatgttgaagatcaattagctttccagttccagagcagagtacccactcgcatgttttgcatgatctcggtcgtcttaattctccatacgtgttagtcccacaggcatctgcgactgttcggagctgtgctcggcagctctgcctgcgcattcgccccacggctgcccaccccttccctgggcgctgcgcctgcatgtagcatccttggccttctgcctgaagaattttttgctaatactaaattctcacacttattttttaaaatggtctttatttgatcatcatttttacctatttgtttttttttagtttgggtagtttgggatgttccaaactaaaaaaagaaaaataacttttcctgaaccatttaaggtaagttattaacatgatggtctgttatcttcaaactcttgaatgtgatggttcgccgagtgtggtctcggtgtcaggatcatttgaactgctgttgggaatgtaagttctcaggcttcagtccaggcctcctggactagacacgcaggggatggggcccagacacgcattcgagcgagtcctcctgtcgatgcacagcgcctggtttgagaatcgtggcttgaatgtgtaattctcacaaacaagggtgttctcctccacaaccccaggacagctgtcagagtcaggaaatgagcatcacgcgttactgctgtccagtccacaggccctcttcatgagcatcacacgttactgctgtccaatccataggccctcttcatgagcagtcatttatcctagccatgttcttctgagcaagaatagccaatccagggtgatggcctgcattgaattgtttcctctgctacatctctttgaatctggatcagttcctcaggcttttcttggcattcaagaccttgacatttttgaagactacagaacagttaccttgctgaatatccctcaatgtggttttgagggatatttggcatatggttcccatttgtcccatcactgcttttgttacctttattgcttgttaaggtggtgtcttcactataaagttatcttttactcttaatatttagtcagtattttgagggggacatactttgagaatatgtacatgtcctcttcctcatcaaactttcactcagtagttttagcatccattgattttcttggctaaattattactatgatgattgccaaattataattttctgtttctatcgttctttctgtatgaccaggtagtgtcctactagaagcaagtagtttcccttctccccatttatttattcattgatttccatatatcactatggactcccagattcctgtttattcagatacatctatacttgtttctgtgtttctatttgttgaaaactgtgaatacacaccagtgtcttcagttccagtgcaacacatcaaggttcattttagtgctctcgtggtccatatccttctcagatgatgagaaagccagcccctgtcatctaagtgtatttacctgccggaatcccacggggcgtagctagtctcctgtctctgctaccatggcgtccctaatccctgccacccaggcaggtgcaggcaggcattctccagtcccgcagaacagctttccatttgaacttgaaggaaggaaggctgtcttcattcctgcaggttattttcattgggtattgagttttaaattgccaatattttctttcagtgcttccaaacttcactgttttttatacttctggcttttgtgtttctaatggtagttcctcttcggaagatatttcttatttctctggcaggttttttccccttctttttaaaagagatttttctgacttggttttatgcatttatactctctggggtgtgtgttgtgtaagtaggtgtgcatgtgcgtctgtactcacttggcctgaggttcataacactctttgagcctttggctggtgttcattgtctgtagcacttttttttttttttttttttttgagacagaatctcactcttgtcacccaggctggagtgcagtggtgtgatctcagctcattgcaacctctgcctcccaggttcaagcgattctgctgcctcagcctcccgagtagttgggactacaggcatgcgccaccatgcccagctaattttttgtatttttagtagagacaagttttcaccatgttggccaggctagtctcaaactcctgatctcaggtgatctgcctgccttggcctcccaaagtgtgtctgtatcgctcttgccacattttctgtctgccttggcgtcccacagtgtgtctgtattactcttgccatattttctctctgctctctttcggttccagttggtcatatgttggaccttttcaccatgcaccatattcttcgtgtgtctgctcctttctgtatatcttgtcttttttttttttttgagtgtgcatcagcctagatgtgttcttctaaactgcctttcaagttactaatcatcctttcagctcgttctaatctgttgttagacctgtatttcttatatttgagttttgaattttcatcctggtttgtttttgattctagagttttcattgttataatttcaagtttactgctgatattattttgtcatctaatttcttaaacatattcatcacaaagttacacagaattatctgataattgcagtatctgtgtcttttgtaggcctgtgtgagtggtctggtccctaacgtttggtttggggttgtttaatcttggcgtttggtggcctcatcattggtgttttgttgttttccaatggcagtcattttttgtggagactttgcctggagtcatctcaccctggagaggatgcgctttaccgtcttctggcaggcatggaggtcagggcaggtcccctgagagcgctcaggaagcaagctggtgacgctgggcttccgttttgtgaggtctggagtgtttctagcttgcgcttactgagaggccatttttgccagggtcccttctttttgttgggtcctgaactgcatgtttggccccacagtgcactcctgctgctgaaagctctgccgggcttctcagccccccggctctgctggtgggaccagggagcgcctcagggacgggaacgtgcagcccagctgtgtttgcttcttctctggaccttggcatccagggccctccctgccctgttgcctttacagcctgatgttgcctttgtagaattcttttctacattgtcccctgtttggttgttcaggaggggacagatgtgttagccgttttaacagttacatggtgagctcacctagcagtttttcaatcactgtgttttatgtggttttgtctgcttttcagtttgtgagcattaaagagaatctaagagaatatatgatattgggcttgtggtttgaattaaatgtttagaaatgttaaaattttgaatcgtatttaaatgactgggaaaatccgatttttaaatttctaagcatttcaaaaagtaaacttgaatgtttagaacagttttagatttacagaaaaaccgtgacggtagtagtgagctctcatatctcacatccagtttccattttattaacttcttctgtgagtatggtacacttgttataattaatgaattaataatacttactgggtttttgttttttgttttttttttttggaaaccgattgtcactctatcgcccaggctggagtgcaatggcatgatcttgactcactgtaacctccacctcccgggtttaagcgattcttgtgcctcagcctcctaagtagctggtattataggtgcctgctaccatgcccagctaatttttgtatttttagtagagatggggttgcaccatcatggccaggctggtctcaaactcctgacctcaagtgatctggccacctcagcctcccaaagtgctgggattacaggtgtgagccaccaaattcggcccttattgttaactaaagcccacactttgaattattcagattaccttagtttttccctaatgtcctttttctgttccaataccccgtctagaatatcacatgacattgggtcctcatgtctccttaggtacctcttggttgtaacattttctcagactttgtttttaataaggagtgctggtgaggtattttgtagactctccctcagttgagggttgcccgatgtttctctagcgattagattggactgtgtgttttggggaggaatccacagaggtgaagcatcaggggcacttgctgtcagtgcagcctggcaccatggccctgaccgtgggctcctggctgaggtcgtgcttgctgggtctccactggaagctgctcttcctctttccagaaagccccatgcacaccacagcctttatgttcctttgttgagtaagaattgtctgactgtttagaggattttgtttaaggaaattcggttgcttgatattaaaaaatgatcagttgaaattaaatagtaataaataataatgaccatttctggaaattcatagaattccttttgtccatcagagacatcagcagcagttctcattgcatttccttctggaaacagcattgtggggatacctggaggtgaatgaacaaagcccctctgggtttcatgtgcagctgtttcagatctgggaaggtttgtggcttctcacaaaaggctctctgcatgggttgcagagctgctttctagattggcttctctgggtactggggaaagctccctcccctccggtagtcccctccctcctgagcctgtgctcagggggcccctcagggagcttcattctgacctgagtgacttcggtagagcccttagcagacaaggaagcgaatactgaaatgtcttgtgtgaagccttctgtaactccttgcacacacccctgagagagtgcaggccttccccaggagtaggaggagatggagggtttttatttctaacaaaaggccccaccctggtgagagtggcttccttttatctggccacccgacagacagcttgtgctagcagcaatttccatcagatgctgagcggaaaaaacaactgttgctctaaaaacacgttaaaaatcaaaccctaactataaaacccattttctccaactcttttccttcttttgaaaacaaatactaatggtgtaataggaaggcaaatgttcatgaaaatgtagtttctcttggatcatttgtgtttcaggttgccttcatctcatttctgtctagttcagctggagacaacaggcatagctagaaaaatggaaagtgtataggaagagatagggcctggagacaggaatgtgtgcaggtggaggtatgtctgatctcatcagaacagatggagaacatgccagagcccaaggagccatcagtctctgacacctcaactcgcagaggccaccaggcaaagacagttgaagttgtttttagttgggtcacagttagaggttctgaggtttagcaagaattattgtgatgtttgaattgctaacaaaattaaatgctgttttctataattacacgttagaagaaacagtaaatacaatcaagacaagaatctttttagaaaagagttcaggttttgctttatgaaaattgcaaaagacaagtaactaaagaaaagtaaagtcggcctttgtcagaggcgaggtgaacagaattgtttcgtctaaccttgtagctggggatcccctacccgcagcgggctgtgcagagtacaagagagggtcctgaagtgcttctcactggtctttggaggtgggaagaccttctcatcggtcttcaggtacacgtgtcaggtcactggtttgctgcaggggagcaaacagcatttgaggacattccacagaacgtgtgactattagagcagaaggtagttggcagccggttatttcctggagcaagtggaggccatggatgccttttcatggcagtggttcttagaagcccattaccctgctaggcaatttctcgctttctgggagacttttttttttttaatgttgaaaatatgtgttttagccaaattctgccattaacatgagaatttctataatcccaattaattttctaaaaataataaaattactaaaactatgccttataatttcatgagaaacttaaaatatacttgcactgtgcttctgtaaataggtggtctgtgtattgtaacatgcccaggacgttgcatgcatgttttatgatgggtattgtccttgttgatacctggaggttaggagttattaggtagcacttctgattcttggaaaacgagtaatgctttgacctttattctttagattaaggattatagtcttcgtttttcttccaggattttcctgatttttctgactttagtgtttttgtagttttgtgagatgggtctagatttgaatttttctttatgccagtgctatttgcatcttgttggtaggatcttattccttgttggtaattcccccattgcttctctctgtagacattttaaacctagttattttatgctctgtctctggagcgctgctctggacgctgtctgatcttgttcgttgtttcttctttttctcacccatggtggcttcttttcttgactgtgttggagactttgggtacagagcttctgccctgtggggctccatccatgggcatttggtgagagtgggtccctcctgagtcaggttgccagatgaagtacaggatgccaaggtaagcttgaactgagagcagctagtattttagtataagtatgtcccaaggtttttaaccgggtatcctatatgatttctcagtcctggcagccctactcctgaaaggaccctttgctgctgccaggcctcagattcctgaggagcagggagggattgatggcacctttgttgcttgtggtattccaggccctggaggtaatgcaaatttcaaccctcgaacctgtgtggagagaagctctggttacgaattcccagtggagaatggtttcaccactgggtgccagctggggtctccttgctggcaggaggccttctccccgcactgaggtgtggcccttcaggagtcacctcacagggacaccaggccgtgtcttgtggctctctgcagctcttgggcgtcccgagggcaccgcggcttcagctcaccactctggcttttccactcactcttccttcttagccctttgtgatttcttgcggagctcagctgtacatgtagaagcatttccagaggtttttatatcaagaagcttttctgcatattagggctgctgttttgctagaaatggaaggctcccctatttttctttataactggaaaccctgttttggtgctggttctttctgtagccattctgtggaggacctgtctgaattagaaagtctacattttatatactcaataggtatttacccaatgaacagtcccccagaatgcagaattgattaaatccccaaccccgaaggcacagaagggaaacctggctgatcaaagaattcttgccttttaatttaatctgagttctatcccagagatagagtcaggcatcttgggagtgctaaggtagtaggaatgacagtttatcccaatacctgctgccaagcctgacatttcagaccccctgcccgacagtgtcatcccagtgtcctaccacttctgcacttagccctgattagatctttatcgtgccaggcactgttgtaagcattggggccacacccgagagtgaagccaagccctgccctcatgcagctcacctcctagtgggcagggagaacagatgatagacaggtaacagggtgccagggtcttggagaaagcacagcgaggaggctgccatgtggagagaggtctcaggcacctgacgcaggggactgagggatgtgggggtgtaggggagcaggcgccacaggggagtgagggatgtgggggtgtaggggagcaggcaccccccggaaggcaggaacaggtggacatggtctggagctagagaagagcccgtcatggtgaggtgtgatgcgggtggggtgagcttgagcagggagtgagctgaaaaggcagcaggccaaggtcagccggggtccgcagctgccacggggacctcagttcagcggtactcctggtgaggtggtggcgttggtgcgccagagagtggcatcatctgggtctcaggtttaaagggttgctctgcttgccacgtcgagtatcaactgtgggggcaaaggcagagggccaaggcggtcagggagggtcctggtggtgcaggtgagagtgctggtgctatgggcgggggcgctgagagtaggcactgtctcttttcccgagagcccccacttaacaggggcattgttgcccctccttgcccagccaagttgcttcttgctttttaggttttcaaaattaagcagactattgctgaaggattccagcagagggagtcagggaagaggtgcagggtggggagcgggctgctgagggcctggtggtggcctttcctcaccggacggtggagccctgggcctctgctgtgttgcctctcctgcagagttgtgtgtgtgactggaggagaggggtggagccagttcagccagcactggggtctaactataaagcacaatagagacaggtagtggcagctgggtggggtgggctgtggggtggggttctaagataggaatttgccgtttgtaacaaaggaactttggtgtaaaggctttaatttaggaatcccaggcatacttcctcatggatcttttcctgacccttatgtttaatttaatttactgatggatggatgagcccagaaagggttacacaggagcacacttctcagggagtggtgtgacgctggggaggctcgcccaccctgtgtctgagctaatttctgaaatctgtttggagcttatatattgaaacaaagccgttattctaactttcacatgaaaagagctccatgtcttttaagatacttttttattagagctcaagttcttttataagcagaaactccttttttaggtttctaaaaagcatacaaacggtgggaagacagaattcttccccaaatcacctacaggtggttcgcccacacctatttcaatagaccttattttagcgactcaccttcatcaaatggttccaaagtgtttcagcctagttttaacagaacagcagctcttccttttcagacgcgtagttttcataacatttaattaaattttgcaattgcaatgacaagtacaactggcgtcgctgctgggaaacagaccactgactcataccacttggtgggagggacagaagtgcctgtgggccagtgggagcaggtcctgccacttggtgtcctgtgtaggctggcttgtgagtgatccaatcggggttggtcagaagagctttctgctgaaaggaagaagagctggtgaagaggaccaagctcgccagagtattaggaggcaggccagactgtgtgggccctgggcgccagcagaggagcctgtagaggagcttcagtgtctgtcagaggccgcaggaaggtcaggggtggtgaaggttgaccatgcccaggatactgcgttgatgaccaggtcataggtgaaccttgagagaagtgtcaggagactggtgggaattagagattccatcttctatagcttgttattttgtcttgtttttaagggctaaggcattctcagtgtgtttataggcaaaagggtaagtgcttgtggaaagagggaaaagatgcaagagaggaatgggaccgttgatggagcagggatcccagaggcaggggggcctcttggctcctcagagatcccagttcaccaagcagggatcccagaggcagggaggcctctcagctcatcagagatcccagttcaccaagcaggcgtggccaggccagatcactgtttgtttcataggaccccaacctagtctgctgaggggaggctggaggggtgggtgagggctctttcctcccatggggagacactctgttggattggccatgtgtggagtggaggcacagaacctacatccagggtgctgcgagcgtagctgagaaagccagctgacccatgctgggtggttgaccaggcccagtgaccacgttggccattgtcattgaagcatctcattccttgattaaaatccactggtgctcttcacatcacagggccagttccagacagtagattacagccatttgatgtgtcatatttacgttctcctagcgtgaaagcagcagtttgtgtgcttaacattataaatatacatggttgaacatcctggatgtgatggctaatgagtctctctggaacagattggttttggagatgtcttgactggcctttaaggggcacggtcgtccagctgtggagcactcgtggagtcagatctccacacagtggttcaggtccctgtgaatcctctcacctgcgtgaagggcctggctgcctcttctaggtgtctgggaagcctgctctttcccatcaactgcacccttaaatggggactccagaaacaggagcagtgtcaggggcgagttagagggcctagcacgccatactcagggacagtggcgggacgctggcaggagcagtggcagctcatggggctccggatcccaggtgcctgtgctcgcccacctgcacctgccaatggatgggtgactttgaacaacacgagaagacggcagttggggtccagtggccttcgttactgttaggaagaaggtccagttgcccattctagacttgctgtctctcttgtctgtgtttccttatccctgaacctggcttccagtctgagtttagggagatctgcttggcgggggaaggtttcccagctcttcctgtggctggatggagtcaaaggcaccaagacctgagtctgggaggggtccagccaactcgtttttcttcttggggttctgtaatttttgctttgcttgcccttgtgtaattctaagaggtgcacagctgctgtttgggttgcagttgtctaaatcagtggtgccccagaagttgccagtgttctgggagctgctcttactgagagaatcatgtctttttactggaactccttcctagggccactctgagcgctctcagcctctgccacagctcatagtttctggctccgcatggtggagtcgcctcgccttctgctgtggctcctccttgtcactcttcagtacactcaaggctgttcagcctgtcggcgggagctccaccttccctgtgcattcgtctggcccccatttcaccgcactcagtgccagacactgcaccagggctggagacacaacccagtttccacaccctggagactcggcagagacacgtgcgcagatgatgcgatggaatcccagaggctgtggggacccgtgagagggtagggatgtgcggtaggttgctgtgtctggggtctcaagactcgcacctcacaggatgggtatgagtttgccaagtagagtcttggggggggcagttgagggagaaggaggatggctgtgaaggccggaggctgcagggcatggccggcaagggccatgatgtgaagggaaaggagacagaacaggtggggagggtggcgagtggggcgagatcgcacagggtctcagggtggaccgtggagcttactttccatcctaagccacgtgggggttacagcaggcatgagattaacccgaggagttcaaatatagcagagtcagagggcattgcacattgttatgtaaccaagtcttgaattgcagtgtgaagaacttctcatcagcgttgatgggatgattaagaaaggtggtcagagatgttggaatttgaaccagaatttaagattcatagatactgaggatttatgggctttatttagagtaacttcttgactattagaaaccctatcagataaattttaaaacagagacccagagctcaaggtaggactactaaatggatgatgtggagtgatggttaagatgacattttcctggctggtgctgtggctttggttgggaacagcgagagatacagaaccgacggtctgggatccaggagggtggctggcaatagggaggaagtgtggacgcttgatccaggaggcacttaggattaatctggcagccatggcctgcgaggtggggagaggctggtggaaggaaggattatgggctgggggctggagtgtcatgggctgaataggacctgacaagaaggggaaagagcagagagactgaggctgaagagggcaccacttctgctgctgatcgcagtggtaacaataccaggtcaccccgagcaccttctgtgtgctgggcactatgctgttgccacaagaagacactattattcttattcccatttgcaaatgagcagtttgacacagtggctttctgaggtcctgcagcttctgggagggcaggactcacatttgggcaagtgtggccgggcggccatgctgcttcccatttccctgcttcttgcagggcccctggggtgagcaccatgcacagactaaggtgtgggggttgtattaggctgttctcgcattgctataaataaatgtctgagactggataatttatttaagagggttttattggctcacggttctgcaggctgtacaggaagcatagcaacttctgcttctggggaggcctcaggaaacttacaatcatggtagacggtaaaggggaagcaggtacatcctaataaggcaggagcaagagaatggggcagcagagtgtcacatatttttaaatgaccagatctttggtggcagagtgtcacatatttttaaatgaccagatctttggtggcggagtgtcacatatttttaaatgaccagatctttggtggcggagtgtctgtcacatatttttaaatgaccagctctttggtggcggaggagtgtcacatgtttttaaatgaccagctctttggtggcggaggagtgtcacatgtttttaaatgaccagctctttggtggcggagtgtcacatatttttaaatgaccagctctttggtggtagagtgtcacatagttttaaatgaccagctctttggtggcagagtgtcacatatttttaaatgaccagatctttggtggcagagtgtcacatatttttaaatgaccagatctttggtggcagagtgtcacatatttttaaatgaccagctctttggtggcggagtgtcacgtatttttaaatgaccagatctttggtggtagagtgtcacatatttttaaatgaccaggtcttgtgtgaactcagagtaagagcctactcatcaccaaggagatggcccaagccattcatgagggatcagcccgcatgatccaaacacttcccaccaggccccacctctgacactgtgagttacatctcagcatgagatttggaggggacatccacactctcatttgatgaacatgctggtgacatgggtacacagacgagtaaagaaagaccttttcacagcagagtggatcttagattttcatatgaatagaagggtttatgatttttggttttgttgatcctgtgaccttggagtgtttgtcttgtcacttgtctggctagtgtcctgatggctctcaggcacctgtccacactctaggcgacacccagcgctagggcactgatgcctcaggaatccaagttttcatctaaaacagcgttttcattgggtgcagtggctcacgcctgtaatcccagcactttgggaggttgaggcgggcggatgacttgaggtcaggagttggagatcagcctggccaacatggagaaaccctgtctcttcctaaaaaacacaagaattagccaggcgtggtggcgagcacctgtaatcccacctactcgggaggctgaggcatgagaatcacttgaatccaggaggcgggggttgcagtgggccagaattgccactgtgttctagcctgggcaacagagtgagactccatctcaaaaaaactaaaattaaataaaaataaataagtaaagcagcattttcagtggggcatgtgtacctggggtctgagcaatatatatgaacatgtttttccttagcgaccctcctcattttgtgcccggaattgaccctgtgtaagttcatgaaaatactgaatgtgtgcaggacaggctgctgattttttaaagtcacgttttaaacattgtatcaggtcactttttatttctgtacagcccttctttggattagacaaactgtgatttggtttctattttaccagttcagtctcttcaatggaaggaagccagatgctgttaagatactgtgctccctccttgaagctgatcgttccctccttgaagctgatcgttccctccttgaagctgatcgtgtccaagatagttgctaggacaacagaatcttctgttttctcgcctgctatttttgtttcttttactatctcaagttgttttcattttcagtattgagttctcccttaccattttttaaaacagagatgtttttattaactttaatatgttaatactgtatgttcttgcctttatgaaattcaccttacagaaaggcactaggatcagtttacctaaacatgcgggagacggaaggccagacgtgactgctttagattcctcatgacattcagaccttacttggaactcagtttggtatctagttgtgttaaaatacaaattttcagtttataagttacttaattaagtttgaaagtaaatgcgtaatgccttcagtgttctctccactttgtgccctgccacctgcactgtggaaattaatcatagaaactcggcgttaatctgtatgcccgagttatttacatctctgtgtatggaaaattatcagcatgtgtccctcgaagaagatgatgagcataaaaggtgatctttaccaggtccattggtttgtatgtgattgctgtggtatgtggtatctgcctgtctactgatggaaagtggtaagatactgtcttacatgcaatctggaaaatcaagtgccctgactttacagtgtgttacatatgattgtatttactttagaatttttagaaagcataccattttcaggtttaaaacaagcacttaggttaggagcttttctattattcacagctaataagagttaaggaggattaagacatttgaactattgttaatactcattgcaacaaatatgacagctaaataatgatatatttgtaggaagctatagttttatgtgttaaaaaatagaacacacattttcaaaataaaaatatggtttttgaaagttgactgttaaaagattttttgaaaatttatgccaattttgttacattcgatttgtgttctacagtaatggaaattaagggaaattgtgtatcagagaagtgtctttaatatctatagtgctcttctttaaaattaatgaaaaactccaagcagaattgattagcatttatatgttataatggaaaataggagttggaaactggaatttccaaatcaccccagaactttgcagtattttgaagctccttagtgcatctagagagaggggagccagtcatgcttggcataacccattgcttgccccagcagagtgaagcccacccggtacacaggccctcactcaatcgtttttttgtttaatttatatatttacagtaatacaataaagggtttgttgctggaatatacacatatttatttatatgtataatatttatcaatatatttacaaatatatgtatacatgtacacacacacacacacacacacacatccttcatgaaaactctttcagctgggaaactgagcatccttgaatgtccctgaggtgactactaggatataaacatcccccaagagaagtgctttgagttacatacgaaaggacctgcagaaagattggagtcacctttatctgggtagagtggattgtggaccataacctaacagacacccaagaaatctcatagctgagaccttgagcaacatacctttactatatatatgctgattgacagataaatggaaaattggagggaatgaggggaattcagtaaaacctcgtataagtagtatgtgattgaggaaagagcttattgtgttatttttaagagttagcacactaaaaagttacaatttaattcaacgaatatttacatgctgtagtgggaaaaagatcctggacttgatcattaaaagatcggggctccactttcagcctgccaccagctagccacgtgaccgtaggcaagtcaagtctctgaacaccctgtctcttttaaaacagagactgtgccttcctttacctcatgctgtcagggtcacaggaaataacactagtaaaaaggtttctacttagaggctgcccactaatatcagtaagtgtatcaatgattgcattggacataactttgtgatgagtaccaaagaaaagtcaaaggatgaagggagctctgagaaggaaggggcattatttcatggcaggattcgaggaggcagaggtggctcaggacagcacttcaaaaagagtgagtggcataggtgttcagtagagaaaagccatggccttggccaggaatagcaagtcagctgccacactcaaggaagacctacttggagacccttgcgatgtacctgggcggggaggtgcttgttcaggaggtttctttggctttctcctgaatgacatttcctgagatatatctactatcaagttaatcacattcactcaccaaataagttcttttctgctttcttcttacaaagtagcatttgagaatgtttttatgtggcacttctttcattactgtagttctctgataagtaactgcctagagcagtagtagggctgttaagtgttagaggctgtctttgcaaaaactgaaataatgacacagagaagcttgtccataaaaatgaatgattcagtgacatctgttgttattagccaaaccctggataggaactttcttagagggaggtgaggtgccctctctggctgaactacctgctcattcttaccttacatttcaaccatatataatagcaggtgagattcacatttacatcttttcctaagttctttttagaatggttatgtactgtaattccatcttatttcctttgtggccttacgagctacccctctttatttcatttctgatgattgccgtagggtttcaccacgggcaactctaacttgtcacagtcaatccacaccttgtcagcatttaaccgcctcacacagaatgcaggtatctggcccgaggccacagctgttcctgccctctgtgttctttgtgctgttattctcatatactttcacagaaaccacacaatggactgttgtgattttggctttaaacagtaagttatcttttaaagagattgaaacaattttttagtcttttagtcttttatccttccctctaccatttctgatgtgcttcattcctttgtgtggacctgagtttccacccggcatcatctttctcctgtgtgaataacttcctttagcagttgttatagaacagatctgggagcagtgaattctattagctgttgcttttctgaaaatatatagttcaacttcattttgttgagtattttcttttgatatagaattctaggttgacagtttttttttcccctccaacacataaaagatattccattgcctcttggcttgcatagtttctaatgagaagactgcagttcttcctagctttggttcttgtccctgatgaaccttttttccctttggttgtttgtaagattttctcgtgatctttttcttactagtttttcataatttaattatggcatgcatctgcgtggttttcttggtatttatcctgcctggggtttattgagtttcttgggtggcaggattatcattttcagaacacatggaaagtgtttggttatcatttcttcagatttttttctatcctcccccttttggggactcttatgtatccatgcattaggtgacttgctattttccacaggtccctgtgactctgtccatttgtttttggcctttttctttctgtgcctaattttggatagtttctgctgctctgccttcaagctcacttatcttctgtgggtgtatgatatgctgttaattgcattgtgttggtttaggtcttccaagaatcagaagccaagagattagatgtcgaagaggtctgttggaagaaaacacctttgaaggatcggggagaggaagtctgagatggcaggagagcctttgctcttccttgcgggactgtgacaagagacaggaagaaagaatccaggaaagatttggccaggctgatgagtgtcctagagccaaagatgcctgtcagggagtcccatgtccacaggaacagctggcaccagaagctcttctgtgctccatcactgaccaggcacattctgtaacgtgcgtggccgtggcatgaacaggcagcagatcctgagggtcaggagcagcaggagcgttgcagaggagcacactttcctccctgcagtaggagctcggcagagcacattttcatggccaccacacttatccaatagaattgtgttttaggaatcctgttttttagctctagaaattctgtttggtgctttttatgttttccagttctctccttatgtttttcatttaattcttagagcatactgaacatttttataacagctgttgtaatgtctttgtttcctaattcatcgtctttgtcagttctgagttggcttgatattttccccttgttatgggttacattttcctgtttcatacgccgagagatgtctcattgctttgccatacgttgcaaattttacgtttttgagtgctagatcttgttctattcctttgaactgtgttagaactttttttctgacagcagttaaggtacttgcaagtcagtgtaaaccttttgaggcttgatgtttcagctttctggtgagcctgcaatgggctttcttcaggaagggcttagcccagtatcaaggcatggccatggggtccctgttgaatgctgcatgcgtgcagcgagaggcccctctgctctggccagtgggagctcgccgactctcagccctaagtgaactctgggagtcatctgcttgcaactccctggaaactgttctttcccagaagtcgactttgtccagcttcatggagttttaccccctgcacacactgatggctactcagccagagaccgagtgggtcccctgtgcagatttctggagctctttttctgcctaggccccacccctttagtgctctactccgtaaaatctagtcactgtgtcctgcccagagtcagatgcaaccaccagactcagtttctccagtttctaaatgtatctggctgggaggcaagtacagaccctgttactgcctcatgaaaggaaactgttgactactacttggcctggtgcctctcacttaggccctaacagtataactgattgcccaggagctgcatagttcacgttaactgaagtctgaagtgtatttcgggagggggcatttttccatgtcagggcttctttaagaccacaaagctgaagtctgtgctcgctgctcagcggaggccgtgctctgcgcattgcgtgcatttgctgcctcctccctcctcctgaatggccacctcttccctgctgatccgcatgctgtctgcacctgaagcctctctccgtgttggtcaggtaggatttctccacccttttcgccctccatcaccttccatcttctactttgggcttctcccacattccaactcatttctaggtttttctagccagagaagagaggactggcttcgttcatctctctcaaagtagttaggacacagcgtttcaccagtagaaggagtttcctccattagaatgagtgactgtgtgtgtgtgtgtgtgtgtgtgtgtgtgtatatttttttccttgactgatttctgtgcgaacagctggcatttgaagcactatatagggcatgtctaaattgtgcacccaagagaagagcctgggagaaacctcattgtgcggccttggccctcatggcacagatcccaggttggctgtagcatttagaagtggacacttttctaacatcagaactcatccagtccttacgttgaatcacacaaactcagtggcgtcactttggatcaaagaacagcacgtttcagctgcctctgcgacctcacctggagctggagaatcaccctgttccccgctgttgccaggcgcaggacctggcacctgtaggcacttagccggcacaggacctcgtacctgtgggcacttaggaagtaattgtgggctaagtgaacttaaaccacgtcgtggactcagctttactgtcttgttgttaccttcctgtactttcttaggccagtgatcagcaaaggtttcctttaaagagccagagagtaaaggttcccagctctgcgggccacacagcctctcacagccgctcagctctgtgctgtgtgaaagcaccaccagccagtgtgtaaatgcatgggccaggttgtgccagtgaggcctcatttacagaagcagtcagcggcgagatttgatctgtgggctacagtttgccgacccatgcatgaggcagtaaaaggccaagagcctggtataaattcataacgagaaaccaaggctctgaatcagccccgaagtgtaagcagcagcataatgatctggagcagcatcttggcgttattaaattcaacccattccgatggctgcgtcagcatctattgctctgtttattgtttttccttaagcaagcagttccatttctagaaatttatctcaagcacataaatctagagggggcacatcggtgttatttatgacgggaaaactgggaacagacacagccctaggctggaagaggcacagagtgatgtacagcatgggccagtggttaggagcagactcaggagccaggggacacggctccaattctagctctgtgaacacactggccgtgtgccaccctcagcaagttacttaatctctctctcttaggaaaaaaaaaaaaaaaaaaaagaaatccttgcacatgctgtaaaattcaaaagatgagagatgttccttctttgttccccagccgcccagggcccctccctcaggcagcctggttcaggtttctttgtagccttccggttggtgggggagagggtagcacctgtgtgtgtgtgccattcaccctcttaactgtgagggtcaggaaaatcatcatgttagtttacattaagcatggacttctgacacacagatttgcacacagatatttgggggaaatcacgagtgggtttgatgagcgtgtccaatactgtctcttctccagtctttcctgtatatgaatcaggatgcacgggtgggaacaagtccggtcctgtggggttttccgggagaagaaagtacagatccacattcccaaacaggctgggccacatccccaagcaggctgggctgcagtgtgcacaccctcatgtgtcattttgtatctgctagtacaaatgtgcacaccctctgcagcctggaatggaagcccaccctgctcatcctccatgtctgggctccatcgggggccagggggagttgtcatttccagcccagccccctgtgaccagcagcccttagggaaaggaacttggtttgtacactgagtcagcccaggttgtcggtgactgggcagggtgcctcccagtgcactgtctaaaatcccttcccagctccaggcctcgccctggaacactcccggtgggccaccagggactgacacacgccagggtcatgggtggagggcagcttagctgcttggctctggaagaggacttggaatgtttggctttgtaatttattgaggttttttttcccttcagtaaacttcctttttgatttctaatggaaaatggaatacagggaaagagcctcctgaaagtgttaaacttatcagagccctgtgaatgtaatgagtccaaaatgccttgaatttagagatccagcgagggaaactccgttcgcattgtacagtagaggggattgcagaggatgagcattggaggggtttgttcctttttctgttaggcgctctttcttcttttgctccttaaggattcttggtttgctcacccggtgtatactcggcagaagccctgacttctgacaggaggaaaatgattttcttttcattttaaagtgggtgtacggccttgatagttcacctgagatagttcaccgcatgccctttgcatctcaacctttggacgcacagccacacacatgggtgtcacgcacccgggcaccgtgaacgagcagatccgggaaagcgtggctcgggaggaaggtctgacgaggcccgttgcggctcccggagtgaggctgccctgcgagggaacgggctttgctgctttcctccctgaggcgttatcatgcgcgttttctcatgtgatgaatgagcactgggttttgggggtggaaggcttattttaaattagcagatacagacgtgaagtagacatgtaaacaaagtggatgattttgcattttcctggtgtgagatgctgcaaatgaacccctccccccccgcatggttctctgttggcctaaaacactgaaaagagaccccaggatctgagaaccctcctgggtatcaaaggccagttaactgctgcctgagaagtccagacacaaactttccgagacaattaatggccactggctggacttagcaggtttggtattctgctagtttctattatctgctctgatttaaaattctatttgcaaagatgaaaatggagccagactgtcccaaacccagcccttcctctgtcagtactgctgtgaacagacctgcgtggctggtcctgtgtttgggtaaaacattaaatgacaactttaattgaaaaaccctggggaagctgacccagggcgtcttaagagaggcgcctgctggccgtcgtgtgggtttgcagcaggttggttaaacgggaaaacctttcggtgatcttttgttcaggtgtcaactttctgttctttgggcttaattctgcagttggtcctttagggaaaaagaaatgaatttctggcaggaccacctctcagatgtggaaccaactacagcgttaccgtttcctggctgcggcagtcgtgtttgagtgtggttctgctggaggtgtcctcgccggcagtgtttcctggagggccttgctgctttcacagctctctggcctgcccctccctcccgggtttgtgttcttggggttgacccacactctcctgcatcctcgacctgttcccctgcacagtttttttcttacctggtgtacagatgtgacccggtatctcccatcataaaaagcagacacccggcaggagtnnnnnnnnnnnnnnnnnnnnnnnnnnnnnnnnnnnnnnnnnnnnnnnnnnnnnnnnnnnnnnnnnnnnnnnnnnnnnnnnnnnnnnnnnnnnnnnnnnnnnnnnnnnnnnnnnnnnnnnnnnnnnnnnnnnnnnnnnnnnnnnnnnnnnnnnnnnnnnnnnnnnnnnnnnnnnnnnnnnnnnnnnnnnnnnnnnnnnnnnnnnnnnnnnnnnnnnnnnnnnnnnnnnnnnnnnnnnnnnnnnnnnnnnnnnnnnnnnnnnnnnnnnnnnnnnnnnnnnnnnnnnnnnnnnnnnnnnnnnnnnnnnnnnnnnnnnnnnnnnnnnnnnnnnnnnnnnnnnnnnnnnnnnnnnnnnnnnnnnnnnnnnnnnnnnnnnnnnnnnnnnnnnnnnnnnnnnnnnnnnnnnnnnnnnnnnnnnnnnnnnnnnnnnnnnnnnnnnnnnnnnnnnnnnnnnnnnnnnnnnnnnnnnnnnnnnnnnnnnnnnnnnnnnnnnnnnnnnnnnnnnnnnnnnnnnnnnnnnnnnnnnnnnnnnnnnnnnnnnnnnnnnnnnnnnnnnnnnnnnnnnnnnnnnnnnnnnnnnnnnnnnnnnnnnnnnnnnnnnnnnnnnnnnnnnnnnnnnnnnnnnnnnnnnnnnnnnnnnnnnnnnnnnnnnnnnnnnnnnnnnnnnnnnnnnnnnnnnnnnnnnnnnnnnnnnnnnnnnnnnnnnnnnnnnnnnnnnnnnnnnnnnnnnnnnnnnnnnnnnnnnnnnnnnnnnnnnnnnnnnnnnnnnnnnnnnnnnnnnnnnnnnnnnnnnnnnnnnnnnnnnnnnnnnnnnnnnnnnnnnnnnnnnnnnnnnnnnnnnnnnnnnnnnnnnnnnnnnnnnnnnnnnnnnnnncaccctggatggtcggctcacatggcgctgcctccctcagttactgggaggtggctgcacagccctgtcttttaagccacagacgcaggtttccaactgcccacgggtcatctctatggggcaacccgccatgtagcccccacaccctgcacatattctataagcagaccggacacttaccttccctggggctgaccagctctttctctctctcacccaggccttcctgaccccgtcaggccctttgaggccagccccaggtgcccgtcactgctccccggtctagaaatagcacctacagcccgtctgacacaggtcacaacttaggccaaaggtcttgtcagactgtgaagccagaaagtcacgtccctctcttgcggtcttcctgccacttgtagacacctgtagttcgagcagcagtgttgggggatccccctggccctggagggtccctcactctcctgacgcctccctggactctgccagactagctgcctgcgccccctcctgggatcccacaataccaaaccccctgggctgtcttggcatcactggctgaatgacctgggctttcatctcagtctctcttcagatttcaaactcctgaaggagctgggtttttctttttttgtgtgtgtcccagaattctcctggcacccaaacaaaaccgtctgtatccacactgtatcctgggccagaaagctggaggctggctgtgccaccctcccccccgcctttagatgggcattgatgtagttaggatgtctgtccctccagatctcatgtagaaatctgatcccctgttggaggtggggtctggtgggtggtgtttaggtcatgggagtagatccttcatgaatggcttggtgccctcctggaggtaattagtatgttctcacagagtgcgcgtcgacctctcattttaaagtatatggcagctcccaccccctacccgcctcatgctcttgctcttgctcctactcccactatgtggcgtacctgcccctgctttgctttccactatgattggaagcttcctgaggccttcccagaagcagatgctggcaccatgcttcccacacagcctgcagaaccatgagccaattagacctcttttctctctgcatttctcagccccgggtatgtctttatagcagtgcaagaatgaactaacagagcaccggcccctccacttccaggtcccacttcacagctgtgcacctaggagaggagaggctttctggggaggaggaagggtggctcctgggccttgaagatcctagagctttgcctgtcctgtgtgtgagatggctggtcttggggcgacctgtctgctgcttcataggatgcgttgtgtgttcgtctgtcactgcgtggccactgtggcagaggccaggcaaggcacatttcagtgatttgtgatccaggcagccatggctgtgtggatggctgtgaatgcctgctgctgattaggataaaggaaaagctgattcttttaaaaatggttttagtacctgttcttaagggcagaatttggaaggggtgtgtgtgtgtgtgtgtgtgtggtgtgtacacaaattgactgtgtgcccatgctgatttgaaaatatgaaaaaactcatcattttcccacctgccatcgctgggcgacacacaccgtgctgagcgctttctcctggctccgcaacgaggtggtcctgcggagcaacactcctctttccgtctcagccagccctgtgctggccgcctaccctcatgaacaggcgtctttgtgctggcaggggctcttgttgccccccagatctccctgtgccctgtgaggttggcctctgtggaccgccacctgagcccctgatctctcccagatggtgggagaagtgggggctgtaacatcctttctgcagctccgtcactgccaagctcagccccccgctggcctctctggcagcatccgctcctcctgggctctgtcgtcctgtcgctcctggatgttcagtggctcccgctagggtcagtcctgcagtgcttccccctcctttgctggttttcctgaaccctgcccatgtctacttaaaaggcctggatgaaactcactttcctactccgccaagggccccttacagccagcggcccggcctctgcaggccctcttcagagggaatttcacgcggggctttttcagagagaactcggtgtttcagttggtgaactgtggttcctgggtcccagccccacccctgtgtctgcgtggctgtccctgctcagggcctcccctaagtgccacccattgctctctgtccccctcctgtggctcttgtcaccctcctgacattaatgagaacactcagtagttcgtttccatttgtggctcccagccctaggacagaagcttctggcaggcagggctgggttgtggtttgtgtacctgtggcatccttgcactcacaggagacacctgccacagatcatgtgctcaccagcattgctgaaggaactcatgaagtacaggcatctgccgggtagacattgaactatgagctggggaaacattcattcacgttaaacagaatgcaccaatgcctttttcccccacagctgccgggccgcaagtacagccctgggtacaacaccgaggtgggagacaagtggatctggctgaagtgaacgggccgccttctgctccagctgcatcacagtgatggccaagctgcatcagccgcactctcctggacgccatatagctttaagatcgggggagggtaaataatgcaaaaattgcacagtggaagaaggggtctcacaaaaagcaatccatcctgtagtataggtaatggagttgggggaagcagcttccattctggatgtttggaaccctttagctttgttttggaatggcccaccattctcactggaaaacagtggtctgctgtgaaaggccagctctcggcagcccctgtggtttcagcgctgccgctctgtgtcattcaggttgtgcacattgtttttcttctgacttccagaaataaaagtgtttccatgggaatttccccatcgtacgtctatgtgcgtgcgggcacgtcgaaactgcacacgtgcacacacgctgctctgggccctgtttggtgtggtgtggtttaattgaggcttacattatgctgaagagtttttctaaaggcctactgtatttattttagtaatgtgctacattagagtagaaaaaataagaacgtgaagaagaaatagcaaaaggagaaaattaccacagatttacagaacaatatgttttaagagagatgttgagaaagattcacgtggccgtcctcagcgtctcaaactcctttgaagggagatttgagcttaggctgttgatgacataagatgcaaaagcaaaataatatactctctttattacccagaaaatcaagttgccagtcaaaactgagaaatgagaaagaaaatcagatttctttattcatctctgttgaagcctagaaaaccaaaacaagctggttgtggttcagcatcatggtttaggaatcaagctgtcagttgtgagtcctactgaactgtgggttttccactgtaaagctccactgtgtccattaggaatcaggctgccagttgtgagtcctactgaactgtgggttttccactgtaaagctccactgtgtccaatatggtagctcctagccacatgtgggtattgaaatttaaatgagctaaaatgtaatagagtttaaaattgggttccttggttgcactggccatagttcaggcactccacagccgcctgtgggcagtagttccagtgctggtgcagaggacgatgctctgctccccgcggaagctctaccaggcctcgctgctgcggagcatgcgaagaagatgcacactccttccctccttgcgtccgcctgcctttttccctctccccttccttccctccttctttcctcctccttccctcccttcctttcttccttccatctgtccttgttttcctcccttcccttcctccctgcctctttccttccctccttctcttccttccttccgtctgtccttgttttcctccctgcctctttccttccctccttctcttccttccttccttccgtctgtccttgttttcctcccttcccttcctccctgcctccttccttgttttaagaatttgaaaataaagtttcccaggagttttgaattggagtcgagatttaagtggctgaagttttgcatttcactaggaaaccaacagctttaatcatgaaatgaaagcacagctgggcattgggccagtcacagagtgtcttttgctctgagcacttcacaaacccattgtggaggggaggaaagaaaaagaaagccatctttaattatcttagctgttcctaatgtctttggctgcaaagagctagctgtttccttcaaccttggtggttgcacgggtagtgtcctcagcagtgagagggcaggtctgccctgtggtcaggattgcccttgtgaggggcagagctctccaaccatgcagggctccgtgtcggcatggtgtggactcgggtgctctgatcatcccctgtgtttgcgtctgaccctgtgtggttgcattcccttgatggaatgggaagtatgtaatttgtagtgctgaggacattcgtctgtttgattttctggtgttttcaatgacatgcatgttcagcagagaaagatgaataaacactgtccaattcttctctccacatagaagcctcaagaagaggtgaggagatgccccgatttccttatttcagagcagtacatgcgttcgtctcacgaaagctcttacaactaaaacaacagcaccaacaaaccaggatcaaaataatcgtgcattttccaggattccatgttggacttctcagtgctttggagatcaggaaataatcatgctgttgcagcagtatggttttgtgtctggattttattcatacaggcatgtgtttacaggcatgagaattctgtattgaaaagaaagtccttgtttttttctaacgtatctttctgttccatcaactgttaaaaccaaattgttaagaacattgagcttcttaggagagattacatgcagctacttaggaccacctcagcaaaatggagttgcctgggtagatagcagcagcagctcaccagccccacgctgccaggctgctggctgctgtccaccaggcagctgtggaacctccatgttctgcctaggtgttgtggcaagaacagcagggaaacaggcggccgcctccaggccacaggtggacccagggaccttcagttacgccgcttcaattgaattcgtggtggtttctctgctacagcagaagtggaagaagctcttgtcttgtttggcatttgtcccattttttggctaataattggctttgaatttctctgtgccctgcttaccaattatagctttctggattggctgttcttagcagtgcaaatgtcaatgcaaagaagcaagcaggcggctactttctgggaagaagcatagtccgtgctcacactggatataaatctgcaagatttgggggtttggcaaaataggggtggagggaaagctgccatggctgtcagaaattggggctttttgaagaaaagcttgtgtaggcatcagccactggctggccagaattccatgaatggaagcaggtgcccgagtgatctggggctttacatgtggatataaatagaagccgggagcctgaggctttgctttaggaaaatcatgagccagaaaacagaggaggtgattgtcagtagtcacctcacgccgctagtgttttctaatactctctcgaattgtcaaagcaaaggaccttataacagcaacacgtgtgtgactcgaagcagcgagcttcccttgggaaaaggagcctcttctcagcagagggtcccagcctttctgtccttccccatcggaatgccaggctctgtgagtttggatgttggacattgccacctgaattccaggaggccggggagctccagtgatggacttgtccccaaaagagtggtgctgttctcagagccataaatgttccactgaaagtgtctgtcccctggctcacgctggctgcgcttgcttgaaggaggctgatttaagggttctaataggaagacaaatgaaactgtcaaattttatctttaagcatgtgagtaagtttgctcattcgcttttactattgatgtatagttttaaaattcttaatttaaaaattattttaatagtaaatttttcacaagtgaacactttttatctttaaattaaaattctgaagctccctagttagttagatccaattgctggttacattttgggaagctctcattttagtgctatgtagtttcattgaataaacatgtttttaatgagactatacctggtgattatattaaaaatcccagcttttaatttgtaaaaagctgtttcctctggcatgttacgcgtggtcatgtgggttttcttacagtgaacgttgatggggcctcctgcatcccgggcagcatctcagcgctggacacgtggcagtgagagcagaaatgctagcagtggctgaggggcgaggcccaggtggaagcccctgatgcagggttgtgcatgtgcagaatctgaaagctgtgagacttggcgagcccgcagtggaggggggtgtctgagccgcaaggagggtctggcctgagctgcagggcaccccccagagcccactgtaggtgttggagggctgaggagagtgcagagggcctgggaggcgagggaaggagtgaggcggccaggctgggtcaggtgctccacacgcgtcagggagaggaggacctgcagtgactgtcgacatgactttggcaagctctgtgtccgcagagctggagctgagctggctggggcaggagtcacagtgtgggaattaaggaaaaaacaagcaggtagggtagagagccggactaccatcaaagcatgagttttctgctgcccggctccgccgtgacgccactcctcccaccagaacgagcgcgtttgtctccacactctcccctgcttgtcattgagctttgttcggtttaggaagcacgaacagaaaggtggctgtgacaggcagtgggctggaaagtgcatttccactggtctgccctctcctgggacaaggtgagcttggtgcttagcactgggccgtcccgactccaggagcaacgccagtcctccaagcacgggaggcttttcctcctctcagtattgcagcaggcagcgcacagcccttctgtccaaatctgggaacctgaaagaccttcggaatcttgctgttttagacgttgtaagaggagcgggtaggaccccacgtgctcaggccccacgctttggatctaccccctctgcagccagagggacaagcagctgctgtgctggtcatggcctcatcccgtgtgtgacgatggccactcacgtcttctcattcaacagaagttatcaccgtgcgtcagacttttatttggattttgtgcgtcttgcatgtatggtggggatgaccggccccacctccaagtgtaggcgctggagcccctggggacgcagcgctgcttgttcctgacagatgggttgcacccgtgggaggggtccagatgtgctagctcttgggagtcagtgatgggtgtaccgggaatggcctggcgtgcatttccattcagaaactcccagtccctgcctggaacctggctccttttgctgtttttttccccctttcctgtccctttcctgggtggctggtccctgctgtcgcccctgcctccctggctgcagagctttcctctggaggactcgacacagagcctgcgccgtctctgactccgggctctgctgccctgccccactttggtctctcaggttggagttgaggttgcatctgctgagagccgtgcccacaggtgaggtagtatcagggtcctgagccagagtccactgtcccctggccgtgggtttggagctgccagccatccttccctgagaacccagcctatgactcggctccccttgggcctgccctatctttccttcctgccctggtctgtcctgcggccccctcagtcctcatggccaagtcagccaacagcaacccacacacagaggccacttctggatgggtgtctggcaaggtgtgggtctgaattcagccttttgcctcgcgtgccaacccccgtgtcctgggctctccaagagccaccttaggaagatggggagtgggtctggaccactgagcaactggtcattctgcatcagctcctgaaagtcccttgtggaccaggtccctgatgaggacaagctcttagctcagaacaacacagaatccagcgctgaccataggacggctgtctaatggtccttctctagaaacctctctgtgccattctgaaagtggaaaatgccggcattggtcatgcgaccttgcatagctgactattttcatggtctctccacccactctggccccttcatgttttgtggagagaatagcagacctcgccccccgccccagtgttaagaggtgacttagacaccctcaccttgaagttttcacatattttctatccatagtatttgtatacttcacacgaagacttattagtggataaatataataaactccttcctattgaaataaaatttgagaagaacatggtatgtgccagccaaagcccaaattcaaatgaacccttctgtgaaggggaagaatcagtcttgttgagagaaagtaatttagatgcagaaggaatcccagctgcctagaaatccccgttgccaacagcaggcgaaaggaaccacccatgggagggaatgtcgcagggcagcggcaggtcgggcggcagtgcagcagccgtgagaacgcaggactcacacttccgggctgtgtcgccaacattggcaaccagtcgtcacctgccaacagcgccacccacttgggggagcatggatggtattggtcgggctctatccagctgtttgttagcagtgagtacaaaaaaataaaaaaatgctattttttagctggtcagaaatgacttgaaagacctcagactgttgagttaacttaaaacagcccctcctttgcatctaacaaagtaataaaattgtgtgtgttcatccaatgggtaaatatgcagcctctgctgtttcaaggaaagtgaaaggctcagcagtatgtgttatcttgccctccttaaggcatgcttttcctctgaatgtccttggctcagaaagctggttgtcagggagcttcactggggtctctgaggggacttctccagaggagctggtgaaggagcgcgtgaggacacaggagagcagcatctctggctggcactctgcccagccgggcaggttgagcccactttcacaaccctgaggcggtcacagcccgaccgtcagggggaacccactctcacggtcctggggtggtcactcagctggcctggcaggtggcacccagtctcacagccctgaggcagtcacagcctgaccgtcagggggaacccactctcacagtcctggggtggtcactcagctggcctggcaggtggcacccagtctcacagccctgaggcagtcacagcctgaccgtcagggggaacccactctcacagtcctggggtggtcactcagcggtcccggcagggggaacccactttcacagccccgaggcggtcggtcactcagcctagcccagcccagcaggtggaacccactccccactgtcacagccctgaggcggcgggggcgtcctccacctcgctcttcctggagagacgccagtgtgtgggtttggaagcggagtctattttaagtttgcagttcctgaaggagcctgtgttggctgtgctgtctccacatggtcacagccttgaagcctccagccttttaaggacaagcctctgcctggctgcctgtggttggggcaagccgctacttacgttcgcggtgcctgttgcgttttcccacctaagagggcacaggaggtggtggaaggggagtggaactaaggtgggggacttgagagcaaactgtgagtgtccagagctgtaggaggttcggagaagacaccgagtgctcctcctgcagggtgagaaaccctcctgtttctgattgcctcatgcaccaccatgctcaggtcacccggcaggcacccctccctggggctgagcccagatcaacgcggagcagtttcctagggctgcggtaagcagctgccttgcactttgcggctaaagcagcacagatctattatcctaagttctggaggccaggaggcctccaatcaaggtgtcagcagggctggtccctcctgcaggctcctggccttcccagctttcctggtttcctggccttcccagcttctagaggctgcctgcgtatatggtcttgtgacccctcctctagtcacctctcctctctgctggcccctgctgcctcccttgtgcaagaacccctgtgatgacattgggccactcagtccaggaaaccccccatcaagatcttcaaccccatttgctcagcccctttgccacccgaggtcccatgtcccaggagctggggatcaggatgcggctgtccttggggccctgttctgtgcaccacagtccccaccttgggccgacaagaaggccctgtggagactggcagccacaggccctgctctgggtggcccttcagcttcttcttacctcccacgtggctggagaggagggtctcacccaccacagagatgggccttctgcctcagagaaggcgtggagcagcggggctggcgtcggcagctgtgccttgcgttttctggcagctgtgagcagccctgccttgccagcttggtcagcagagcctcgcgtctgccgtgggctggctgcacccctccggggccctggcccaggcccaggcccatccctgtccccatgtggtgcacaccgtggggagaggtggacataggctgtcccatgtgtggtgacaggtggtctccatagccatgtctggcacagggttgcccatccaggggagggaggcctctgggaggaagagaggggaggctgctttgtccatcgtggaagttcaaaaaacccagaaaaacccctacaggggtacctggaagctgttggtgctcagaagctcttcccacctacagatcttgtgatggggcctgcaggtgagtgcccaccggctgccaaggaaagcctcaagccgcacagttggggccctgccggccagtgggggtgggtttgctgcgggctgcacagtgctggcctcctgaactcttcaccttccacagacaacagcatcctcatctctgcccaggaggtctgctcctttctcctgggcccccctccccactctgccttcagagccctttgtgctttggcccccaccctgccagccccctccctgcgcccccctcctcaccacccagtccttcatgcagcctttcctctccctgggcttgcaggtctgccccaccaagcccccattccaggacgcagccaggctgtctgccctctgcgagcaggtgtggcacatgtgttgctggttcatcccgtgggctcacaggcggctcctgtgcagacctctagtgggtgtgggannnnnnnnnnnnnnnnnnnncggccacgtgaatctttctcaacatctacacccccagacccatgccacagcacctaccgagggaaagagaccaaagggcatgcaccatctcaggtctcgagagggacagagccaggcaggagcctgggcaggcgtcagcagggccctcgtgttcctgggtcccactgtccttcccgctgcccagggcatggccaggccggaggcctcggtgtgccgttgggaccaggcctgggaacccctctggcttgtttcccctttttagttacacaaatactttatgatcacttctgaaaatttaggaattttaggaatgaacaaggaagatagctttagagttatatacattttcttttacttgccattagagtcttcctagaccctgttttttaaagatgcctgactctccacgcccggctgtgaccaagcctgccgcccctccatcatagctgcttctcagtgtccggcacatcctgtactgggtgctgaggggacccagggagggtgtggcgagaggaggaccctgaccaggcatccctgggacacggctgcccagcacgggcattttttcttttatggaggctcagaagtgaggcctgagaacacaagagaaacggcctcgttagaccctggccccactttcttcccaatctcaaccaccttcgacgactcagtcatcaatgtctgcgtctctccccctgctgtcctctgtaacccacgggtggctgacgcagccattgtccctgtctccagggcagcagcacaggagcgtgtggccctcccgaggcccctcccgcacgccctgtgggcaccccgggtcccatcgctgcagggttccctgtctcaatagtagcctctccttctgatgtcttgtggtcagatgtttgctggaaagggccccagagccccagtgaaaatccagactcagagatgagactgaaacgggaagtgtcagcattgttttagggtttttcacttcaaaagccaataatcctctgaagcagggcccttctgcactccttccaggctcagcaactacctgacaaaggaacgaggggctgaagcggaacgtactggaagccctggccagcaggtggccagtgggacgctgacttgaaacctctttgaagcagtcatgggagcagtgggaacaattgccccgtaattgttggacagtgtcacacaactagacaggcacctacttgaatcacagaatggagctgtgtggtgtttctgtgacactgggatgaagctgcaggcacgagcaggggtctgcacagccgaccacggggacagacaggcgtgcggctgccactcacctgcacgtggtggccatgtgacatgcacaggcccttacaccgccccaagctcctatccgtaccagtgttg

SEQ ID NO: 399 - DNA, 1476 bp, Homo sapiens
tcctgagctgaccgggtagccatggccttgcggctcctgaagctggcagcgacgtccgcgtccgcccgggtcgtggcggcgggcgcccagcgcgtgagaggaattcatagcagtgtgcagtgcaaactgcgctatggaatgtggcatttcctacttggggataaagcaagcaaaagactgacagaacgcagcagagtgataactgtagatggcaatatatgtactggaaaaggcaaacttgcaaaagaaatagcagagaaactaggcttcaagcactttcctgaagcggggattcattatccagacagtaccacaggagatgggaagcccctcgccaccgactataatggcaactgtagtttggagaaattttacgatgatccgagaagcaatgatggcaacagttaccgcctgcagtcctggttgtacagcagtcgcctgctgcagtactcagatgccttggagcacttgctgaccacaggacaaggtgttgtgttggagcgctccatcttcagtgactttgtgttcctggaggcgatgtacaaccagggattcatccgaaagcagtgtgtggaccactacaacgaggtgaagagcgtcaccatctgcgattacctgcccccccacctggtgatttacatcgatgtgcccgttccagaggtccagaggcggattcagaagaaaggagatccacatgaaatgaagatcacctctgcctatctacaggacattgagaatgcctataagaaaacctttctccctgagatgagtgaaaaatgtgaggttttacaatattctgcaagggaagctcaagattcaaaaaaggtggtagaggacattgaatacctgaagttcgataaagggccgtggctcaagcaggacaatcgcactttataccacctgcgattactggttcaggataagtttgaggtgctgaattacacaagcattcctatctttctcccggaagtcaccattggagctcatcagactgaccgtgtcttacatcagttcagagagctgccgggccgcaagtacagccctgggtacaacaccgaggtgggagacaagtggatctggctgaagtgaacgggccgccttctgctccagctgcatcacagtgatggccaagctgcatcagccgcactctcctggacgccatatagctttaagatcgggggagggtaaataatgcaaaaattgcacagtggaagaaggggtctcacaaaaagcaatccatcctgtagtataggtaatggagttgggggaagcagcttccattctggatgtttggaaccctttagctttgttttggaatggcccaccattctcactggaaaacagtggtctgctgtgaaaggccagctctcggcagcccctgtggtttcagcgctgccgctctgtgtcattcaggttgtgcacattgtttttcttctgacttccagaaataaaagtgtttccatgggaatttcccca

SEQ ID NO: 400 - protein, 351 aa, Homo sapiens
MALRLLKLAATSASARVVAAGAQRVRGIHSSVQCKLRYGMWHFLLGDKASKRLTERSRVITVDGNICTGKGKLAKEIAEKLGFKHFPEAGIHYPDSTTGDGKPLATDYNGNCSLEKFYDDPRSNDGNSYRLQSWKSRLLQYSDALEHLLTTGQGVVLERSIFSDFVFLEAMYNQGFIRKQCVDHYNEVKSVTICDYLPPHLVIYIDVPVPEVQRRIQKKGDFMKITSAYLQDIENAYKKTFLPEMSEKCEVLQYSAREAQDSKKVVEDIEYLKFDKGPWLKQDNRTLYHLRLLVQDKFEVLNYTSIPIFLPEVTIGAHQTDRVLHQFRELPGRKYSPGYNTEVGDKWIWLK

SEQ ID NO: 401 - DNA, 32495 bp, Mus musculus
ccctaagagaatgaaaaggaaagatcagcaggggttgatggggagggatctcagccagaggacacacacacacacacacacacacacacacacacacacacacgaagaggataagggtgggggaagcagaagctgctctcaccttcttgggctgtcactgtgaggatcccaaagagctgtgcctgcactttagcaacttgttcgatgagttcgatgcaataatttagattttgatcacaggagtttgactgtaacgtcgaaacagaagatatcagtacagcatggtttccagaacccactgcaaataggcaagagcctgtgtgatccaggggctaccaagttctgataggctctgacagagactgctgggtaccaccaaaatatagtgccctggacacgtgaccaggattgaactgtgtggcccatgcagctttagaactgaattcaattcatggtctggaaagtgatgtgtactatgaccaggtctggcaaagaaaaatcacccaagaaatcttgtttctggattccagatctgtccattaaatgcagaggaagcatggtaaatctctaaggggagagaggagtgtggaccctcaagacacaccccccaaaagctattgacctaacaaacactggcactgaactgacaactggctatgaaggctgttttgtgggtgtgtgagccactgaggtttggggaattattttcatagcaatgattctactgagtagaatcctgaaagagagaaaaataaataaatccccttatgaactaaagataccgtttacaccacaatacacactgttgacttgtctgctttaccgattgattcatcgtgtgcttaaaatggagtttctaacattatatgcagagtctacaactcctcctttaacatcaagaagatactctgctaggcaagggatgcagtggggagcaagacaaaaggaagcccacgtctaccagctgaaaaccaatggcagggagcaggaggggcatcaagtccactgaagagccgccatcttggaaagctagggaaagttctgaagcctgtgaatgaaataagacaactagatagtttggtgaggaacatggggccatattggataaggcatcctttcaggagtaaccatgaaacactagaaggccatgtgggcctcttagtttatattcaactttgatcattatttaatgttcacagctaaacctcaaaccgattccaacactggaaaaaaggaacagaaccacaagcaaacaataaatcctgtgggttcaaactacatagatttatgtcggaagttatccaaacttgctgaatgggcctattttcccatatggaagagctggtaataccctgcagtgtgttaggaaaaagaatctaaacaaactatacccagctctcccaagaagcagaagtcagctgtgagacggtatgtagcattgaaaggagtaggggcttaggaattaggcaaccctgggctcaaatcccattctccactgataaaatgagttattttaagaaagaacatttaaacgagatgctctgtatcctcagatttaggaagcaattaactttctcagccttcttcaagcatagatcttaaattacaagtgtgtctgtggcatcccactacctacttacatgctgtgcctggtatccaaaggagagtttgtgtacacacctcaaatattcaaccaggatatcccaagacatgctacaacatgtccagctccccacacaaagcattgcataattacccattatcaagacagcctcaccatctgataaacagagaaaaggtaggaattaaaatacactctgtccagagcacagagtctccagattcattcattcataagtcccagactcctagtctacctagagccttggattggcatcccccgtgccaaagttacttttaaaattaagcatgttgacttggatgaactcagcagctggtgaagtgaatggagaatgagaggcaaatgggctctaaatgatcatcccagactataccaatcaagtgttctgtgtaggcagaaactaggagctgaacgaaagcagctctggggatgaggaagggaaagagaaatggggtgaggaaaaggggagacaggggagggcatctcaagagacatgtcagactgactctagaggagaggtagagtatgtgtacgacatcgactgggtgttgggatggagtaggagagtaagtctgaaggggaggtcaggctggcagatgttgaagaatgtagccatggactccatcattaaccatatctatattaaccaagatcccattgatgcttagcattacataaggacaatgagtttggctttggtggttcagggtcccaacaggaccctcagatggaaacagaaatgtcttatgagagtctctagcagagcctctattccctctcaacacatataccttacaggataatcctcaaaataacccaataccttggctacctttaccaccagagactcaacaaagtaggaaagtgaagttaggtcatttgaagagaggatagctcaactgggcacaagctcagcattcaagagatgcttcctaccacaactcaagaggaaggattgggggtgtggctttgtatgggagagagtggaagcccatggaagtgagctcacagggaagaaacaagatggggagagcacgctcaggtcaagaaggaggaccatcttgctggggcagaagtggggtgaggaagaaaggacagtaaagagcaaaacagaagaaaaagaagaagaagaagaagaagaagaagaagaagaagaagaagaagaagaaggaggaggaggaggaggaggaggaggaggaggaggaagaggaggaggaggggggggagatgaagacagagaagcagagggtggttctgaaaaaggaagaggtctccactatgctgtatcatgtacttgccctctctgccgctcctcagctgcctgatgataagactggaaccatagcactatggtcatatgacatttctcttactagcacccctatacaatatgttctctacaagtttagtgcttagattgcctccttaagaccgtgttagtctactgactagggagtggataaaatgggcaaggaatctgttggaatacaccatagcaacattgacagacatcaaccacaaattctataccaaacataaggcacacctcagtaaaatctccttttgtgtggtgatatttaataccatgtttttaacacttatctttaatgtaagagaagagcaatacagagagaactcctcttatattaccagctttcccatcagcctcactcataaattaaatatcccaatctttcttggggctagggccccattgagagaatgtgtgcctgccatgcaaaaagccctgcctctatcactagcagctcataaactgtgcataatggctcacatatgtaatcccagggcatgaatgggggaaaacaggcaaattagaaattcaagttcatttctagctacataattaacttcgaggccagcctgggctacatgtccttttgttaaaacaaacaaacaaaaaattttttttctgaattataatgtccttgtatgtattattttacttttaaaaatatcatttatagcaagatatggtggtgtatgcctgtaaactcagcacactcaagaggctgaggcagagtgattgcaagttagaggctaacccaggatataacaagatcctgtctcacaaaacaaaacaaaacaaaacaaaacaacttgtcatctatcctatcttgaggatctgctatcaaggatagcatatttaccatttgctactataattatagaacacacttcttcagagtcaagtcttggcagaaataattcaggttaactccttagtccacaggactttgagggaaaatggaagtatctcagaaggaggagggattcaggccagggctgacctactgaaggtactctaatgtaaggtgaatttcacatgacatcttcaagcagtaattgtcattagaattcaggtctgcacataaggtgattcatgccttttgcagaagtggccaataaaatatacagatgtaccataaatttcaggtggttaaactacatgctctcacatgaaccttaagggtcattcttgatgtctttcatcttgtctgcttaatatgtcaggctgattcattcgtacattctgttgcctcaagtgtcacctagctccaaaccctttttctagagattcccatttccccatcataagacaactagaacggcctgtatacacctaatcctaagtggttttctttctgcattatgctctcagagtccctttctggccctcaaacaaaggctgaactcccaaacacacccctcaaagctctctggtatctgcccccaaccccccaccttctcagcttcatcaggtgtcgatcctcccagcccccaccaatcctaaatcttgcacatgaggcttcctctacccttccttttcttctgcagattgaggctcatcattaagattcagctccattagggatggacagatggcttcactggctgctctagtgaagaccctggttcggttctcagcacttacaggacagctcacagccatctctaactctagtttcaagggacctggtgtcctcttctgatctctgcaagcactgcacaggtgatagatacacaggcaaaacacccatgcacataaaataaatgtttttaattaaaaatatagcttccagtgctaataatccccacatctagtacagaaggcacaccatatgctctgaaaagaaaagaagcctgtctcagagcacagtggtgagtgcagcagtggggctcctcaaatcaaggctgagatgaagagggccagagaaggaacttcatgcagcaaagctaactcaggtattagcccgaatcatccttagttgggaaaacttgaaagtgtgcattgtgtttagagttaatctgagccatttacacactttcttttaaagtttcctactggggaatggctttaactgtgttcatgattctaaaggattatacgtgactttttttttttaaagttaattctagctaagccaataggagtatacactgcaaaattaaccttccaaaccaacacagtttacagctttttaataaatatagtcttctacaactaacattattaacaactagagtttgctgtagggaatacagatcttaaggtttaagtcaagattccctagtactaataaaaacctctttgggggattacaggactgtgcttagcaacggatccaaatcgaaactacacttaacaagatatgggatacgttcagatgtaaattcagaaacaagatgatctacattatttaaaaatgagatctagaaagtaagtttacatattgtttaatccaatcccaacaatggaacagataagatgctgagacccagtgtggctaggaaacgttatttggctagttgtagccacatagagatggagaacctaaccgtcactttcctgactgctccccgcctgggtaaaactcagagcctcctcttgaagacacttccatcgaagagagccaagttcaacatgcagctgttgaaacaccgctgaagtggcattcatgaagtttggagtgtgcttctgagtgtgacagtgtgctggtgacacagtaatttcttacaaaagccttgccagcacctcctggaagttgccctgctaccctaatagccatgctgaccagcgggcaaacaaaaagtgcaacctttacaagtgccccttttccttaatagcacccaggtgtagggaaagttcactccgggaatccctaaaaagggaaggaggggggaaggtcctgagaatgggagtggctggcagctctaagctacccttctgttgctagggccgcgggtgtccaaggttaccgaatactggttagcgctacggctggagtcaccccaccaccgataaaggtggggctttcttctttgacctgggtaggagtctgagatccccttagggtcccaagagcggtggggttgtgagccctaggatctcccaccctgactcacgttgtagtcgttcacccagtaggtgactttatcctgcagtgcttgtaaagattcgcttttggccagcttcttcaggctttctgccatcgcgcgctttttcgcgcttccgactctgggagatctagtagtagaggggacgagggagtgggtggcttaggctgaacgacggggtgatgtagcttaaggatgttatcttccacacaggctcagaacgcggctggagtgtccatcctccccctcgggtcggaccgggcaggtcccccctgcccggcgcgctgttctggctcccccgcagccgcctgccgaccaggccataaataccccggcgattattaaacaaaccttgacgtggcggccggctgccagggacccggggctagcgtcggagcaacgccccgccccccactcctcgctcccagcctggggaccttggggacccacccctaccgcgacctcctcccacccagcgccgtggcgtaacgggcccgaggcgaaggcacagaagcgtcgaaactccgacttgtgctaccctctggaggacacccagaccctggggtggggggctgctgtgggaccctgcgctgggaaccgcagggcacctaacccggggctgcaccccgtactgggtggcagtgcgtacgtaggaaagcaagttaacttcatgaaaattttgagtagactttttggcaaccacttccttggccctttctttattcctccacccatagtgcctttaattctccatttgtgaaattgggactccaatgtccgttttttactactttcattttgggctttgtgccctcctcctcctccgtgggtctgtccgttggtttgtactgtacagaaagacacacactaccgggcgggatcctcgccctgacttccaggtcttcctcagcacgatcaggtgcaagcctgtgttgtgtgggaagtgggggtgggcgggtgccatgacactcgtgtcttactgttcgctgtgtcagggacctgtattgctgttcagaggaaatctagcctctgttccatttgcacgaaattgctttttaaaacggagttgctaggatttaccagtccgagaagtggttgtcatgcaagctcgaggtcctgagtggatccacaggagacatggggaggttttgggggttgttttgtttgggtttcttgtttgtttgtttgttttaaatccgggcactgacacaggagattccctgggactgatggccaattggtctagatgattcctgagctctctgttcaggcagagatcctgtatcaagaaaataaggtgaagagattaaaacaatatctggcctccacacaagtacagagaaagggggaaggggaggggagcggaagaaagaggaggggaggggaaggagaggaagaaagaggagaggggaggggagagggaggagaggggaagtgaaggaaggaaaggggagggaggggaaggagaggagagggagggaggagagaaaggagagaggagaggaggaaaggagaggggagaggggaggggggaaggaggaagggaagggagaaaattatggtaaaagcagaataatgcaagataaaatcctgaatatcaaatgggtgtcatagtgaactggtataattcccgttaaaataagactgctgtgagaattagagacattgcaagcacacagcaccctccaaatgcatcagaagggaaaaaacttcaaaacatcattagacatgacgaacactacccttgtggttaattctgtgaattggttctcattttaaaaaatcatttatttatttatttatttatttatttatttatgctccgtattttatacccctcccggtccaccctttgactgttccacaccccacacttcctccccagcccccccccctgtctccacgaagatgtccctaccctctccctccccaaccccaccagacctctaaactccctggtgcctccagtctctcgaaggttaggtgcatcttctctgactaaaccgggacccagcagtcctctgctgtatatgtgttgggggcctcatatcagctagcatatgctgtttggtggtccagtgtctgagagatcttgggggtccaggttagttgagactgctggtcctcctacagggtcaccctcctcctcagcttcttccagcttttccttaattcaaccacagaggtcagcagcttctgtccattgattggttgggtgcaaatatctgcctctgactctttcagccgcttgttgggtttttcggagggcagtcatgctgggtcggagggatggctcagaggttaagagcattggctgttcttgcagaggacctgagtttggttccctacacacgtttggtggctcataactgtaactccagtcctagggggtctaacagcctcttctgacctccaccagcaccaggcatgcaggtggtacatatacatatctgcagggaaaacattcatacacgtataatatcaaatcttagaaaacaacagcagccagaagaagacacattggcaatgagaacaagtgggtgacctgtcagtaacacctcagcaacgaggaatccaaggagaagagacccatcttcagacagtcaaggtccatccgacttcagaaaaatccattattaaagtacctatgtggagacatgttaaaaaaaaaaaaaaagcaaggtggggcttcttatctgcttagaatctggagtgccaggcagctctggaagacatttaataagttccattattgtgagtgattgagactgacacaaggttagaaacagagtagcgctaatcagagtatgggggctctgaagagaatgtgacatttggtgggttcttgggggacacaaaggagtatagctgtcagagaaaaaggaaacgacttgagcatagtgaatagtgaggcacaggaacccaggagcagtcaaaagccttattgtcaaagttgataaatgggaccagagccaagctattacccagacaccgccgactttcaaacctgtgggttgtgatttacatagtcttcctgactaaaacgcaggttcgtcccagtgatagagccaggcagttttagcagttggggaagaagacaggaccaggcaaatgaccacatagatacagcttatatccgaaatcaggcatgagagagggggaaggttgggagacatttgctgtgtgtcagagtatttaactccacagccagccagccatcagaagtaggcgaagcagggaagctgagttagaaaagcaaaatgacccagtacctggagagaaaaagctgaatcagacatctcccttgggtggcctagggtactttgtagaaactactcatcatctgaggagttcttgaacttaggatgctactcattctattgttttcaacttaatcagtgcagagagcaaccaatgtgcacctgactgtctcctggtgctcactgtgagtcaagttaggttcctaaggacctaatatagtctccaatattaaatggacaatctgcctctaatgcctcaaagaaagtgccagacttgacttcacaggcttccagaggagttgagggggaagagactagtttgatttaagctacctaaagtttccacttgatctgcacccaagtctcacccaccagtacactcaaatacatctctcccttgcagtttgtcacagctcaggacaggacagtatcccaagacggggagttgatgtaaaggtaaaggcatgttttggattttgagggcgtcctttccgaagaacttgaggatgccccagagatccttgccacacccatgcaacccgcgggcgactcacggtcgtgagggaccgccctgcaaggatgtgaacctacacagaatcttgcccactctggatttctttcgggggagtggcgagggcgtgacagggcgtggccatcgagggtgtgagccccaccccagtgccagagcgcaagcgcgggctgcggcgggccaagatggcggcagcggcggcggcggcggcagcgaccgagcaggtctgtgagcctgctgcggccggccgagggattgggaagccgggtggccggggcgaccccacagagggcggggacgacggagggcgcgagggctgggctggcggagcgaggcggcagggcggggccgcagggcgggagctgtccgcagccaagatgctggcgaaggccgggctggatcctgggcagcggctcccggccggccagagagcggagctgtccctctgcgggagtgacacgggtcatggcctgcggagcctgcgcctggacgtgcctctccgcagccagaaaccatgcggataaaaataacgtcagtcggggccgggaggctgaccgatgccagccaagtggtggtcagctgttgcctggcgtggatcgtggccaggtcttgcttctgccattccccgcccactgtggtttctcggagattcagatactaatataaaactgacccgtgtctagtgggtttaagattactttttaagaaatgcgttatcaagtgtttcctggtcttcgttgtgagcctagaatagtttaaaggcttcccttcagatatcaagctgtaacttaagcacgcacatatgtgtgtgtgcgggtgaagtgtgtgaacacatgctcgtgcaagtagttgctaaagtgacttattataataaaaagctatttttgtagtcacttctttattgttgtttccctttgcaaataaccagtaagctggtttctctttaaaagtttcatttcttcgaaatcactgcggggagaaagtgaatgagtgaaattgatatgcaacgggggaatagtttcttaagtggctaacattttagcgacagacctattaaatattcgaggactcattctagggggtatgaaaaacagacctgaaatctgctaaacaagcacggaaatcctctatgacaataggcaagtggacttgttgggaatgaagccattccttggttttcctagtttaccccttacagcctctgggttagaggggtctcagttcttctgtgcatgcatcttgatgctctgagcttctattctaccggaaagttacagtggtctgcccacttggctaccctaaccagagccggcctgcctgaagagagctaaggagaaacaagcattgggcttaatgaccagcttccctcaactttataattcgaacatgaaaggttgctttttgtgtttgggatcccactaactttgtaatctattctgtttgggagtcagggtaggccccccgctgtgtcagtcactgggtcctggcacttctgccccttaaaaaagcttctcccccagcttcatcaacaaaggaagatgttggtatcttcttccccagctcctctatcccaggtctcagttggagcttgagtctgcttcaatgtaaatgtgttcaggaggggctggcaagatggcttagtgataaaggtgacagccaccaagtctgacaacttagtccctgagttaagtcccgagaaccatcttggtaaagtgagaggcccaactcccaaaggttgtcctttgacctccacacgcttatatcatggtgtatgtgcccctcacacactgaataaaagaaaagaaagaaacgcagaagaggaggaggaagagcttggggaaggaggatggagaggagatggaggaagaaggggagaaaaattaggagaattagggaggaagaggaagatgagggggccaccagcagcagcagcacagcacttgcagaggcactgccccaggaaaaagttcatctcacatatggtgacacttttgccggttaccacatcttccacttcacatgtccctcgatgtgtctctctcgcccaccctagtttatctcctcattacctcaaacctccattaccacattacaggcaggagcctgccgacctctgtaaagtgttcacctcgtgttcaacatgctgaaacacacagtaacctccagtgacgcccagttaaacagaacataagattagaagagcctgcaccctgctgagaactggctcagcccggctcttccttccactctcccccagtgttgccatatctgacccacccactcctctcattttcccaccaactccagggtgtccccactctcccgtttgacctctgtggcatgggcaccctgacatgatagagtgcacgtgccttgtaacacaacgcaggtccataatgtctacagcaaaggatcgtgtcctcctctctcacgttcaacttctgtgtcagtgcttaagtatgatggttcttagtacattgtcttctacaataagtgcattgcctcggagctctgaaaaacgcgtgcaacttgggcagtaaccattcctgctggcccctttgtgtttctattacataacacgcttgcttaatgacacttacggtcaagatcggaagttctcaagttttgttttgttttttttttatcccagactctatatatcctcttaactatctgttggtatttaccatattagaaactaacctgagaagttgtgaaaacagaggaatgcctgagcaaatacttcattaactcttggagtgatgatgtcactgtaaacgatgacatggcctctggagacaccagcgttcattcaaaagagtgggggagtaaaaaaaaaaaaaaaaacaaatcttattgttgttttttaaaatgtgtctgacatttcagaccctgaagagaattcagttgacatccctcctaaacatacatccttgtgcaactgcccctgaacacatcaaaaattactgatctagaatgatataggctttaacccattgagttataagtagcaatctctgtcagccattgcaaaaatcttttcatgtaagtaaaaaaatatatgagtaaaaatctaacaaatcattagtaaagatggtatcaactgcaatgtgtgtatacatgtgtgtgcatgtgtgtatgcactcattagtcatattatccactgaaatgtgtgcatgtgtgtgtgcatcaactctgcccagaagtgcgctgtacccatattgacagtaggatgaccaaaggcagagagaaagtgtgctatatgacagtaacactgaaacctgcaattcagtgtgacttgcaacttattgatgggacatctaccaacaaccaattcagctttctttaattgtgaatttgaatttaataaactcatgaaaaggagactagagctgttgcattctgttttgtttgtagcaagggtccaacgggccagtgaagaaatccatgcgggagaaggctgtggagcggaggaatgttaacaaagagcacaacagcaatttcaaagctggatatatccccatcgatgaggaccggctccataagactgggctgagggggcgaaagggcaacttagccatctgcgtgatcgtcctcctgtttatcctggccgtcatcaatctactcgtgagtatgtgacacactgtcctctctctggaggtaccttggaagaaatttttatctttttgccatgaggtcatagattctgcttacatactctgttttgggatagtcctatcttctgctcatgtgctgtgttttgggacagtttgtcatctcctgcttctcaatatgtgttttttatctcttgttggacttgagttagtgcttgaacataaaaaaacctaataggcttctctctccagtcccacaaaaataagtaaacaaagctgaaaaaaaaaactagtaagatatatctatatactaatctcatctagaaaaaccttgatagatttttttttcctttaaaggagttgtcttttaataaaggctatgtaaagtcagtggaagagaacttcattgtgacttcattgccctttctcactgaggctgaggccctagctgtgcctttccctggatagttaatgatttgaagaagtgggtttttaatatggcattgtaactctggtggctaaccctggaacctatggcaccagcttctccatgaatgataccgtctgttaaaagagagccggtcatccatctctctctctctctctctctctctctctctctctccctctctctctctctctctctctctctctctctctctctctctctctctctcagtgttcttgagaaggccttgttctcttccaaaacatttgtgcctaacccctcactgaggttagagctgtcacacagtttaaagaagccataaatagctttcctggtcattctaaatttattgtgccttatacatttgctttattggagacttctggcaaggatgggtgaattaaggcatttcaatccccttctctaaagtaacagtgtcaggaaacagagttatatttgaagggagtgagaagtagccgaaatcctaaggcataatttatgaagacaaaagaagagggagaatggcagataacggatcaggagggaaagtgtgtgtgtctgtgtgtctgtgtgtgaagggttacaacctgtattggtaaagtgccttacagaagccagaggacaaggaccttaccagtcagaatcaaaaggatgattgaaatagactcattgtgtgaaaaatctgtagttagtgaagttcctcgagccttgttcccagctaagcagactctccatctaaccacagctaaaccatctatatccaaacaccctggactgctgcatgagtgagcttccatcctgaaagcagggcagcctgactgagcacagagctcactccctccagtcctttacctttatcctctgcctccagctgcctcaagcaggccagagatggaggacccctccctccagagagagagaataccatgtgacagtgacccttgacagggccagtaaaaagcctactttcagctgggcatggtggcgcacgcctttaatcccagcactcgggaggcagaggcagaggcaggtggatttctgagttcgaggccagcctggtctacaaagtgagttccaggacagccagggctacagagaaaccctgtctcgaaaccaccccccaaaaaaacaaaaacaaaaacaaacaaaaaaaccccaaaagcctactttccctcctgggaagcctgtaggtcaggggcccacccacaccgggtgtcctctgtgaccctgcaagcctggaacccagtgcttgggagttggaagcaggaggatccagagttcagggcatgaaaggccagcctgcagtacatgggatcccatcccaggaagctacaacacaagaactccttaaaactaaaaccagcttctttggagaaaaattatattccatccatgaaacaaaagtgacatgacattcaaatggcattattcaattaaataatgaagtcatcgaaattcacttatgctgctgctggtttccaacacctgcatggcagcttacaactgaaaagctccaaaagatgtgatgccctcttctggcctctgagggcactgcatgcatgagatgcacaggaatacacgcaggcagaacacccatacacacaaaaaatatacaaatccttaaaaagtgacatatacacatacacgggtgggtgagcaggtattggacaaataaaagagtcctacaaagagacttccatagagtcctacaaagctagagcatcgttctggaagcagtctcataaacggagattcggaaaatgagagcagagaaagcatcgaaggaaagaaatcagataaaatgattttaatgaaattctccaaatcccagtgtcatggcaacaatcttctaattccagctctcaggaggcagaggcagtatctctgagttcaaagctagcctgctctacagagtgaattccaggacagctagggctagagtaagaccctgtcccagccttgaaaaaagaaaggggtggggagagaaaagaaaaaagaaaaatcccctagaaattttgaaaccagtctgggctcagtatgatacattttaaaagagaaggcagcagaggaggaagagacaaacagacagaccacactatcactgtaaaatttaaggaaattgtaaataaagaatctatttaaaacttttctagagcggtgataaacgtgttttatgggaagaattaaagcacagtgttcctggacctattgtgagcattggggagagcaaggcagtgaagccgtggcctgcagaggtcagaggtcagaggtcaggtctcaggtccaggagaagtaactagaggagaaagcagaactgacctcgtctgagtagcttgagttgcagaacatttattttactgagagagttgcagaaatatacaagtgtttgagatttagttcaatttatcaaataaaagaaaatattgaactatgaagacaaatttttaaaaaagaattagaatatagtgtttgacggtatgatggtgaataaaacttacatggtcataatcagtaaatgctgaacatagatttgacggaatgtgtttggagttgatagagaaaagacataatggtgagcccagattcccatctgctaaaatagataaggcagagaaagccttactcggtaaaggaagaaacacaatctacattatgtatgaatatggagacagagtctagatggaatagcttaaattgctgaacatggttggttgtccttggggaaccaatgaggggagaagaggaaacagtgacactgccatttatgatgggccttctggcatgcctagctctcgactgtgtgcttagggtcttgataaaaacatcctctaagaagaccaccaggtagtgtgtccatctcactgattaaacacgtccagagacctcacacactcagagagcactgctggttgcttccgggcgtgtctggtgcatgcctcgtaagagcagatatgcctgtctttcagattacacttgtcatctgggcggtgatccgcattgggccaaatgggtgtgatagcatggagttccacgagagcggtctgctgaggttcaagcaagtgtctgacatgggcgtcatccacccgctttataagagcacggtgggaggacggcggaatgaaaacctggtcatcactggcaacaaccagccagtaagtttccacactgggggcagtgtgtggaggaggggggcatagacggcagttctcgagatatcctacagctgaaagctggaaattggtgtcttctcttttaaaatatgcattaacacacaaagttatccatattcataagtactcgacagtcagtaatattgttggctttataaccttgctagagttaggtatgcaatattccagatcttttttccaggagaaaaactcactggtgtaagaatttgtaggtcacagttttcttttccagatgacaaagccattgtaagagctgcctcccaggtcagaaagcctaggttctgggaatcagaaagagaaatgctactcggtggcagacaaggcccggtgctgctaaaacacagcacttagccaaatgaaacctccagggtgttccatacctccgccgtgaccgtcttagggcccagccgtgttccctgtgacctgtgctgttatacagggggtcatgtgtgagcaaaggactgtacagacctgcattttaaagttgtatatcatgcagagtcttatgaacaggtgcagctaaagggatctgaggtctggctctcactgtcgcttcaggttctgtccttactgctctgtagttctcttaaacccaatcggctccatcactttgtctgtcgcatcctttgagaacagactcacaatgaagcacttttccccaagattgtcttccagcaagggacgaccaagctgagtgttgaaaagaacaagacctccatcaccagcgacatcgggatgcagttttttgacccaaggacacacaatatcctgttcagcacggactatgagacgcacgagtttcatctgccaagtggggtgaaaagtttgaacgttcagaaagcatcgactgaaagggtccggttcattcttttatcaatgctaacgggggatttgtcagcagctactccctgggggaggacttaggccacctgacaacctgactttcagaccattggagggctgcagccctggccttagcctgcacacacactaataagtcctctctttgtgttaatccccacaattataagcctgccttgcatagtccagagttgagacacccccttctctatgataacgattctctcattacccacaagctcgccttagcatgtgctttcatttttagattaccagcaatgctaccagtgacttaaacatcaaagtcgatgggcgtgcaattgtgcgaggcaacgaaggcgtcttcatcatgggcaaaaccattgaatttcacatgggaggagatgtggagttaaaagctgtgagtattttttcctgtgtgaatttaagataattaattttggaatagtatataattacatgtggagtagtatgtggaaaatgattttttgtcatgatgagatgttcaaaatggattgtgaaatgaaagaaaattataaaataatttataagatatttcatttctttcagagcatgtgcagtttataaaatctggaagaatagagtaaaataataatgtttagctaagagtggtagaataacaggtgatttgatttgtaagtgtgcttgtttgcatttttatgttattttaaaaggagaaaagccataacccaagcagcccttctgagagagaattctaggagatctaaccatgtgtccctgacgtcgctgctgttgttccactgtaggttattcctgttcgtttccaagctttgtgaccaaagctgtaagaagaatacttgaatggggccacatgctgttatctgacacctgttagctgtgagggagaaagtctgtcatcactgtgaccccagcttcacaggtctccccaaagcttcagtcagcctcctacttcatacagagcagctgcagcctgcaccctgcttactggcctggactttcagctagaatggagttacccgcttgcctctgggcaccttgctcatcttgcttccctagggctgaggaaatttgtgctaccaaagagcataaggcactagcagcctgagcacttagaagtcattctcccctatcaaaataagttcagtgttataattcgtagaaataataaaccttaggaaggaaagtaggtgtttcactttggcagttccccaactgtttaatcccatctcgggatgataagatgagcataagctataactcctgccagaggcgccgcagccgccctgaggaggtttccacggcgctgtggtagggcgctctctgaggaatgacaagcagccacgcctgaagcttgcagttgacactgaaggtcagagaagggaggtctgaggcctttgtgtagagaacgtgtgtgagttacctgaatctttcattctgccctccagaaaagtcttgccccactccaccttgtcaatgtgacaggtcatgaaatagtctgaagtacccatacctactaatttctaatttgtattgaaaaatactcagctttgtaagtcagttggtatcgatcattcgagtgcaagctaatcattagcaataattttgccgcactacttcctaaatgttaactttcacttttattttaattggcatgtaatattcttacttctgtggaacattgtatgttttgatgtatgtgcacatgatcaaattagaacaggcagcatgcacattacctcagatatcttctaaggctcttagacaaagaacattcaaacctatctctcctgactcttagtgcacaaatactgttaacactgggtactgaatgctcggcaagaaatattttcaagaaagtaaaactaaatgaccacaagatggcagcatagaaacaaaatctgaaacagccctcaccactgcatctcccacatgcaactttcagaataatattgagtgctttgttctgaaaatttgcatgttctgccagtaaaatccatgctggtattccaaattaaataagctctggaatatgaaatggttccattccaaacgttccaggcaaacgcctgtacataacagtgaccattctattctgccctctgacagtcttaagcccctccctaaagtgacgacccccatgcttaaaacctctgcgttggcctttcctgttcaggagggttctctagtccagctgcctgcctcctttccccacttccacacccacaggcatctgaactcctcaagtgtgacatcctgatgtcctggctcctcagcagacgtgcatttctatctgtgctcggcccaactgccactggcaaagctcagctccacctgaagggccctgcagcccccagctgcttctcgccaatgcagcttctgtctgtgtgcaggctattgcacttcccagactgttggagcagcctgctggctcccttttgctgttcgcccattagatacgagctgcttctctacccagaaacttgtagccaccgacattttctatgagatggagtctcacctgcaccttaggctggcctgggctcaaatcctcctgcctctcaagtgctggatcggaacgctgggatatagatttgtgccacagcgcctgcttcagaccttttaaaaagacccatctctatcaccctctaagtgagcttcccttccagataaagccctaagtctatcagctcagcccccactatttataggtctgcccccactatttctttgtctcacatccttctgagcccctttcccttaacttctgagcgtcctgtaccctgaacctacataagacacaccctcactgtggcctccactggcgagccttccctagtgacccacatgccccactcactcacacctccacttctgttgggatgcaaacgactgtctctggcaccttgtgtaaactgcagtcctcagccacccaccctctgttcaccctgcttgtcttcccttgtagcatttatgcccccgcatgccctagagtttcctgtgctgacttattatctgcctccctccagtgaacagcactctataagaacaaacttggctgttgagcccatgttcactgtcatcgccccagtgcctaggatggcgtctggcaggtgacagcatttagtcattatttgttaaatgggagagaagaaaggagaggaggagggggggagacaagaagaaacttactagtctcttgggaggctgagatggctcagttggagaagtgcctccaaacaagcaaggagacctgagttcagaaccatccatcacacacccaagtaaaaagccacgcatgactgtgccacgagcctgtaatcctgctgctaaggctgtagaggcagacggatcagacagagtagctgacttgccgagctccagatccagtgagagagacagagacagagacagagacagagacagagacagagacagaccttgcaataaggagtatgatagccactgacaaaggcatacatgttcaacctctgagctccatgtgtgcacatgctcacacaaatgcttgagagcgcgcgcgcgcgcgcgcacacacacacacacacacacacacacacacggtcttaagagtgtacagatgagaatgattctgtagctatgagtttaaataagaaaccctcagttttttttgaaggcctagtctgataaactacatagttttaatatttaattgaatttctactaactaaatttaatttcctataagagaaaaatactcttctcccccaatcaatatcaacatcagtcaataagtaaaaattctctggagtcaaaaagtgaaacttacccaagactttgtcactgtgcacaggctgtgatcttgactcgtgctggcgtgctgagttgtaggtttgtggatgtacaatatgggctgactgggcgaggggtcgcctttgaatccttgtgtgtattgtgactttgctgtgccacagttggtttgatcatggctttactctctgactgccaactcctcctcctgctagttcctaagtcctgtctagtttagtgtctctctttcgtgcccgctggtggatgtgactgaaccatgttactgtgttcccataggaaaacagcatcatcctcaacggcacggtgatggtcagccctacgcgcctgcccagttcctccagcggggaccagtcagggagtggtgactgggtgcgctacaagctctgcatgtgtgcagatggcacactcttcaaagtacaagtaacaggtcacaacatgggctgccaggtctcagacaacccttgtgggaacactcattagacggtgcatccgcagggctcagcgcgctcagatctgacttgaccttcccctttttaagaatgcatgtgaaccatgtttgtacagcgtttgccataacttgtaattattttacctggggagcaccactgtgtctattatgtactctccatatttaagggatcttgagtgcctacattctaatacattttagtaagttgcactgatactcaacagttctctaaaacaatgatgagaaattaataaaataaaattaatctttgaagtgtttttaacattctactatatcttgtcctagaggacaaagggctgaagtggttgagacactccatcagtaagccttggtcattctaagggagagatccactagagatgtttggagagacagggacactgtgctctgtctttggtttttaaaggggaaggcacagatttttaatgcattaacccaaagctacattttcacaaacaagtcattaaggagctttccatatataagcttgtaagaaactatgtttccttagttttgcactaaagaaaatactgtcatggtatgtttacttgaaataatgatacatgtatttacggtgtgtggacgttaaacgcaatcacagttctcactctcgtgagcaacagaagccatcatcatcaggcctcttcttgctgagcactgtcctgggtgcgatacacttgatctctctgactcccactgcacctctctaagcaagggcttcgatcccagctttacccatcaggaaactgaaggtcagcgaggttcaggatgctgccccatactatacagggttgggagtcaagtacaattccaacccaggtaaacctgattccaaatgtgtttctgccttttttactatctacactgaattttcaactatttaaaactctcaaagaatgggaaaaacctaatcctaattcacctaacaggtaaaaaaacaagcatgtgtgctactctagttaaaatgccaatgctagaaaaacatgaccaatcactgtcagactttaaactctcttgagccagttctaagatgtcattcaatagacagaccagcttggtctgcttgtcatgtgggagtacctgaatgagttatagagaagctggcatacttttccctaaaccctggggaagctcagtggaaaggggggaagctaggcctcagtaggtcctgctgtccagaggttgttcctcctgtgtcccataccagcatcaccctttagaagaattctgtgtgtgcctagaaattaatatacacgagaataaagggtgctaactggaaagatgacgcaggtcattttagctaggtataaaaccttgatctctgctcctcacctcagtctcattttaattaattacagccctcaagccagttgattcttagtacagtttatacttgatttaaaaggaatttcttggtattactaagaaacatgggattggggatgaagaataatgcatagctccaaagcagacagtagggaggcaccatgggcctagctacagagaaggatgttggtactctgtcatggtcacttagaactgtgtgggtaaaaaatgagcacataaaacaattcgtgttcactgttgtcacaattctgtcaaatgaaaaaatgaaataccttatagactgtgaactcaggctaaggtgagagttgactggagaccagacactaagtgcagattttagatgtaaagaaagagagcaatttatacctctggatatattcaagtattgtttaataactaaataatgctcagaaaaatcacgcttggaattctcatgtccatgctcagtgtatttttaaattgtacatttgtttcatgttctatttaaatttgttttgagaatttctttaaataaatatttttactaaatccacagaaccctatattacaaagtattatttactgaatacaattcatgagaaaaaagtgtatttttacgtctgtgggaaacacttgtgttttgatacatctccattgagcactttgaagtttgagcatatcctgctgctctgtaaagcgcgtggttactaggtatgctattttagactgcattttgggtagaccctctgacacactgacctgaaagcagagaagcggagcttggtgcacagtgaagcggcactgttaaatctggccaccagggggcgtatgccttctcatgtgttcatttcttcggttttgaacatagcacactgagaggacttactgcagcgctggggaaggtaggtgcaggaaggacccagggaggaaagcaaacacacatttaacagacagtattcgagaggtgaatatcaatgcaaagagatagaaataaaaagaagaccccttccagactgtccagtgagaggttggggggtgggggatacacaacacaaagcaggagctacctgccgactcggcaaccttttaaaatattcttcggtggcaatcttcttgcactgtgacagaagcaaaataaactttgtgtgatagttttggtgatgaaaggtagaatttctacctgtttttgatgagtggtttgtgttttcttgtttgtttgttttttgcttttttaaaggagttaaaaacttgtttttaacttgatgaagaggagaccactaaagtgctgctcatggtaatcttttgaacgacatcaagaggggcaaagtttacaagttatgccacacaaaaatatacctatgtatttcagattgatgacctctgtttacaataaagctctgtgaacttggcggtcagtttcttcgtgactttattaatgagcatctacattagcacaaacacacagattctaaatatggctggagactggagcatcaagacctgcttatgcgacctctctgcaggcagaggtagagagccgcccaatctcagtttagattctcaccttctgggccttagaagaaggcttctctccgagtggccgaggaaagggtgtggactcagtaagggaggagcccagagatgaaagggttgggctggctgcagagctgggtaaggtgggcggagtctcaagggcacagatttaaaatcctcccctggctggatcagctggagacagaccagttagaaactacctaaggaccctcaggtaggcccccggagcagcgtcctgcccttcctgggcctcatttccggaagggcttctatccactgtttcccctttctttttccaatttcttagagaagaattcatcttttctctacttccgtttttcctgttaccttctcggtctcactccgactacacgttctccagttatttctacttcctcacacttcaacccaaacgagtctcaaaagtcaatttctacttaattacctgtactttcctctggagttctcccgtttgtggggtttggtggtggtggtggtggtggtgggtggtttgggcttttgggtttttgttttgtttgtttgttttctgggttttgttttgttttgtttgtttttttgtttttggttttttggtttttacctcacatagacatttgtatgtaatataatgcttcttttcatctcagacataaaattatactaatctgcctgtttttagtgcaaatctattcacgtatcaatctcttcacctcgaaaaaggccagactataaaaacctttcatttatattccattttaaaaatgtatgtttgaaccccatttttttcttcagagttgaaagaatgtgcataagtatgatcgctgtaatttttttgctactattacattagcttgacgtccagttgtatgcacaatgattgcagcgttggcatcaaaataaatctctctctgaccaagaaaatgaattcagcttttggtattgcgtaaggggcatactataatttactccttgccgtaggtagggcacctttgcagtttatgtacctaaatttagatgccctctgagagatgggagagttgaccttgcatgaaacaaaagtttagaagttgcagtgagaatgtccttcattctgtgcattcattcatgcagaaagcatagccagtgacaggctccagagccttaactctaggaggcacacgggggggggggggctacttgctctcctttcccttttgtgctaacaatgtgtgatggcattgacattctgtcaagctgagtggaattgaatgcattcactcaatagttactgaaaatatcgggaaagcaaaggcgaagaaagcattggctactgtgagaaaggcaggctcagaccctacaaattgagatgagacttgacggatgtgcactcttcagaccgtagaggggagtggcattgaccgtgggttagaggcagacgcaaaactcattttactgtgaggtagacacatgcatccctagcccaggccacggcttgccgttgccctgcaagggcctcatcaaggtagctgtggtatagaaagttctgaatgcctaccttgggaatttggactataggcaattaaagaaacacttaaaattttcgaaggagaaaaaaatgcatatggaaaataatattgggggtagaatgatccctggaattacctatgatgcagaggagagtgggcaggagggcaggaagctcagcagagctattctagtatttcagacgtgacagtgagaccaggcaggaatgggtgatttgtggctgagaaaaattgtttgtattctggttttgtctttgcagggtttagcgcagagcaaatctcacaaatccatttcccccacctcttgcaggtgctttcttgcatgcatactgcctttgtagcgtgggcacactgctttcaaaacctacagttgcttcccaagagtggggtgggggtgggggagtaaagactcaccatttctatattgtatgacatctcatggcttgggtgcagaacgcccttttcatgaccatttttatttaccttgtgtacattttaaaagggtttaaaattgtgtgaaaagtagcaaaagccataaacataaagtttgtggctctagtgaggacagactccagtgcctggcctgtgatcgcactttctgttcatttgtgaggttcctgctttagtgaggctgccgtcattcatggtataaaccacatgacggttgttctagataagcatagcagactttgcccaatgctggtgacacagagctgaggctttggcaggaggaagttggactcactagagagcagaccacaggctggaggatactgggaaggcagaggaggtaaggctttggtcaatgtggatttcatgaagacagagggaggtctttccattaagcgtgcaccgtgtcatcttagtctacagttacacctttccagtagtttcttttcagaacccagtttctaagaactcaaatgttcacttcggttgataattaagcatgttttctaaatcttcaattagagagtcaatttcctgcttttgatttgctgtttccttttacacgttattttgaacggcctgatttgcttatctttttccaggcattatgagagacttctacgtcagagttactatcctagttacaggtctttgctttgtggaaacagtgacaaccccatcaagaaaaagcagcgtttccttcaatcccgagtaccagaggaatggggaccttctggtaaactggtcttctataagacacgtgtcacagaacacagacgccatggatagaagtttctacttctttagagttctcttccagcctcacacacaaaaagaacggcacataaaacctccggaccgcactcaccatcgcatatcgaaagtgaccctcgaccctctggcgcatttacatgctttggagatactaaacctcagcaacaaagctatccactacttctcgctggatcagcccctgcctccttcctcacaccaaaagcgccacggaggccactcccacagccggctccccaggctccaggtgctgatccttcaaaggaatcaactcagtggtactcctaaaggtgagcaatgtgaaaggatacacgagacagagaaagaatatgtggggcacgggtgttttatgtcaacaagggttctgtgtttatgttcagttacaagggagcggctgaaaaagcagagtggcgaccgagcaaatacaataaaggcaagaggcactgcctaccagagtggaactttcaattagtgccgcataatgtcccacttttccactcgaattaatagtgtatgagtttgtcaagaaacaccaaggcatatctagatgctggatctctgatattttaggtttttgcagttgcttgcttgtttgtttgatgagctagagtctcactctgtagcccaggctggccctatgtagaccagagatctgcctgcctctgcttcccaagtgctgggatatgcatgagtaccaccacgcctggctacactatcttgtttgctatatatatttactaatatgtgcaagcagtgagaaataatgaatacaggtatttttaatatataacaatttaaattaaacatgttaccatatttacaattatttttctttttaaaacgtatcttgcccttttagttgtcctccaaatgtagatcaggaatatctcaatatgatatagtcgcaggtaaaacttcctagtatgaaaccaaaaccagaatgtcttgcggcagcttaacctgggccctggagatgcgccctgcaggtttctgggacaagggagtttctgattcagagccccaaggagggtcttttcaggggtacagaaaacagcctcacaccagccctcctcttcccaccccaaggcctgctcctcagctggggcagaattttagagaacatcccccatcagaccttcagtttggagaaaagccttccctttgcgcttcttcaaagccccttgagaaaaaccctggcgattccctgctctctgcctcagctttccctgggactaactatagcacagccctgccttctcctcgagtggagagaaaaaggaactggagacagggacgcaggagagggggagacagctcacaggatcagcaggtgaaaagaagtgaaaagatctgaccctccctcctggggacagatgtgttctccagggagttgggaccaatggtaaacttatagagggaacaacagaaaaataaagcaagtcactcctgcctctggaattctgttagaactctggcaaacgatgccttcaaaacaggaaggattcgacaccgcacacgtaatgtgtggatctgactggacatcatagtcattttatccagtccgttcgtgatgtgagctcacggcctgctgtccacatacacttgaagtttgccccagattggtgccctgaaacaccccttgcggttctccgattctgactagggtaggccacacaaccttgaatcccatctccgaggggaggagttagtgagacgcgcagcttggggtgtgtcccaacttccgacctgcccttttctcttgcttttctgctcatacgtctaatgataacgtctagataatgcagatgctccctggtctatagtcaccataaatccatcacaggtcacaaataccgcaagtcaaaaatgcatttatatacacctcttggagttccaatagtaaatgactcccaccaaagacccatgtgtttgaacacttgggtcctttggtgacactgattgagaaggtcacagaaatttttaaagaaaacaaaaatcttgctgaaggaagcacatcactggggcggggtttaggtttcttgcctttctttcaaagcttggatgccaggtattcagcccgctgcctgcctgtggccacgccccctcccccagcctcagtgagctccagccctgtggaactgtgagccaaatcccttttatccttacgttggttttactaagatagtttatcacaacaacagaaaagaaactaaccaggtacataatccaccaggcattgatgcttggcccaccttcccttagaccttctcaggacacttatattagcaggtagcttgaagaaagccatggaacacaaagtccgttttctgataaaacgttgggtagatatctcatgtaacatcgaacacaatactgaatgtgtgaaccagtggtcgtgggacaccattgtaaataataataataataataataataataataataataataataataataaagtatctcaactcatcataaatcaaaaacgccagaagctttattcaaattgttaaggttcagtgtaaaggttccttcgtgcctctgcaatgtaataagtcacgctcagtacatggcagcaattaagagacataaagatagtttggaaagctgaaaatgatctgcaaatattcggttttattgctctcttggcacagattgaaaacgacagcacacttagaaatagatgattcatttgcttctctctaaaccttcaactgtctcttaaaatgttcaataattactgtcatgaatgggatccataacccactctaattcatgagcagagtgctgtgtgtgtctgcttaactgtgctttactggtcccgagcagtaataaatgagaaacaccgcagaaggcagctctcaagcaactagctatgtagcgtacgcggcttcataatttgtgacatgtgtctttaaatagtgcctgtttatatgacactcagaaaagcccattattataaagttacagcatcacacactgattaatctattgtcaggtaatcttgttgagtcagctatgatgtcaccaataagctttatattgaggaaacaccctgatcaggtgctggtcaatacaacagagaagccagacattaatttaaccttaatgatacttctacctaccattcagaactttcgaatagcttaacttaattaacttttaaaaagttaagtagtaacgtttaatagcctgaaaatcagcacgctggtttttatatgactctaacataatacctgagatgaacaacttacaaagaagaaagttttaggtcacagtttgcagcccgtggcagctggttctgttgctctgggacctgttttgagcatcacgacagaagcccttggtagaagtgtctgacctcgtggcatcgggcagtgagggagcacaagaactccacattagcagtcccattaggggcatgtccccagtggcctcaaaccccaggtgagcaccatctcatcaaggttccccttcctttcagtagctctgagctgggggctaagcctgtaacaatgtcgtcttggggcacatacccaggccacagcaatggtactttagaggtttaaagcaatggggtcagcctctaagttcctcaccaagtggtattttcaaagctgtacggagtgaagatgccggggcaaacgcctctctgtggttccagggaagctgacaggtcagactcgtgtccttacgttagggcccactcccaccccaaaccagagggctgcagtgagataagagctgacattagaaatgaacagaattgagcaagaaagaaaatgcagggtcttataaaacaaaagctttctgtattcttttacccacaggatttggattatagaaatataaataaccattgttctcaaaatcaaaagtttctaaagacataaaatatatggacaacattaagctaagaggacaagactttgtgtcacttatacaccttcatcacagcaagggagaacatactgaataaaatgcctcaccttggatcattttagacaccactccagtttttagtacttggaacatgaagccataatgtcagaatggccttgtgctatgttatctcatgagcacttggaaaagcatgcagaagttcatagttcaaagacactgaggtggtggctagactccagtctccacccttttacttactgacctgcatgtaatttccaggaaatagtaggactgtctctggctacttagatgctggatgattcaattccattccttcctagcctaggtaatcatcagaatgaagttctgtagttaattccatttcctcaaagtcacttctgagttttcctctcagcatcgaatgttcctctctgaaaacatggaatctaactgtggcaggatgtcccagggccaaggcaggatgtcccagggccagccagcacagcacagctttgttcactctcctacccatcatcagcagctcaaataaggaacacatttttccccacttagaaatgcaccctggaaacatagatgggctactctaatcgcctaactctatcttgggagatcctactcagacaagatcatttgtaaaaatcataccagtaccttaacaaaac

SEQ ID NO: 402 - DNA, 1239 bp, Mus musculus
cagagcgcaagcgcgggctgcggcgggccaagatggcggcagcggcggcggcggcggcagcgaccgagcagcaagggtccaacgggccagtgaagaaatccatgcgggagaaggctgtggagcggaggaatgttaacaaagagcacaacagcaatttcaaagctggatatatccccatcgatgaggaccggctccataagactgggctgagggggcgaaagggcaacttagccatctgcgtgatcgtcctcctgtttatcctggccgtcatcaatctactcattacacttgtcatctgggcggtgatccgcattgggccaaatgggtgtgatagcatggagttccacgagagcggtctgctgaggttcaagcaagtgtctgacatgggcgtcatccacccgctttataagagcacggtgggaggacggcggaatgaaaacctggtcatcactggcaacaaccagccaattgtcttccagcaagggacgaccaagctgagtgttgaaaagaacaagacctccatcaccagcgacatcgggatgcagttttttgacccaaggacacacaatatcctgttcagcacggactatgagacgcacgagtttcatctgccaagtggggtgaaaagtttgaacgttcagaaagcatcgactgaaaggattaccagcaatgctaccagtgacttaaacatcaaagtcgatgggcgtgcaattgtgcgaggcaacgaaggcgtcttcatcatgggcaaaaccattgaatttcacatgggaggagatgtggagttaaaagctgaaaacagcatcatcctcaacggcacggtgatggtcagccctacgcgcctgcccagttcctccagcggggaccagtcagggagtggtgactgggtgcgctacaagctctgcatgtgtgcagatggcacactcttcaaagtacaagtaacaggtcacaacatgggctgccaggtctcagacaacccttgtgggaacactcattagacggtgcatccgcagggctcagcgcgctcagatctgacttgaccttcccctttttaagaatgcatgtgaaccatgtttgtacagcgtttgccataacttgtaattattttacctggggagcaccactgtgtctattatgtactctccatatttaagggatcttgagtgcctacattctaatacattttagtaagttgcactgatactcaacagttctctaaaacaatgatgagaaattaataaa

SEQ ID NO: 403 - protein, 330 aa, Mus musculus
ERKRGLRRAKMAAAAAAAAATEQQGSNGPVKKSMREKAVERRNVNKEHNSNFKAGYIPIDEDRLHKTGLRGRKGNLAICVIVLLFILAVINLLITLVIWAVIRIGPNGCDSMEFHESGLLRFKQVSDMGVIHPLYKSTVGGRRNENLVITGNNQPIVFQQGTTKLSVEKNKTSITSDIGMQFFDPRTHNILFSTDYETHEFHLPSGVKSLNVQKASTERITSNATSDLNIKVDGRAIVRGNEGVFIMGKTIEFHMGGDVELKAENSIILNGTVMVSPTRLPSSSSGDQSGSGDWVRYKLCMCADGTLFKVQVTGHNMGCQVSDNPCGNTH

SEQ ID NO: 404 - DNA, 35156 bp, Homo sapiens
gtatatccacagaaagcttgtactgtgtgcctgcaaaagccacagacactcaacactggcctgtaaaggcagcccagagggaggctgtaccctgcaaagccacaggggcagagctgcccaagaccatgggaacccacctcttgcatcagcatgacctggatgtgagacatgggctcaaaggagatcattttggagctttaagatttgactggccagatgcggtaacacacacctgtaatcccagcactttgggaggctgaggtgggtgggtcacctgaggtcaggagtttgaaaccagcctggccaacatggcaaaaccctgtctctacttgagcgtggtggcgggtgcctgtaatcccagctactcaggaggctgaggcaggagaatcacttgaacctgggagatggaggttgcagtgagctgagatcacaccactgcattccagcctgggtgacagagcaagactctgtcaccaaaaaaaataaataaataaataaataaataaataaataaataaataaataaaataaaaataaaaaaatttgactatcccactggatttcagacttgcatggggcctgtagcccctttgttttggccaatttctcccatttggaatggctgtatttacccaatgcctgtatccccattgtatctaggaagtaactaacttgcttttgatttgatttgattttttttttttattatactttaagttctagggtacatgtgcacaacgtgtaacttgcttttgattttaaaggctcataggtggaagggacttgccttctctaggatgagactttggactttggactgtggacttttgagttaatgctgaaatgagttaagactttggggaactgttgggaaggcatgattgcttttgaaatgtgagaacatgagatttgggaggggtcagggggcagaatgatatggtttggctgtgttcccacccaaatctcatcttgaatttccacaggttgtgggagggacccagtgggaggtaattgaaccatggaggcaggtctttcctatgctgttctcctgatagtgaataagtctcccaagatctggtgttttttaaaaaaggagagttttcctgcacaagctatctctgcctgctgccattcatgtaagatgtgacttgctcctccttgccttctgccaggattgtgaggcatccccagccatgtggaactgtaagtcaatttaacctctttcttttttaaattgcctagtcttgggtatgtctttatcagcagcatgaaaatggactaatacagttacccccaaattttacaaccctcagaaagaaaaatattggctaaaataccagtatttaagcagctccctcaaaacagaacacactttgactaaatgtctgtattgctcatttaataattagacttacagtgtcttaagatagaatagatcttcgaaatcaccttagcatatgctacgtgatatttatctctacatatgccccagtgccacaattagattcaagacctttaagacctgcagtcatttcatgtacatcttggcttccctagaattcaaggatgtgttgtgtatagcaggaacttgtgtttatgataagaagcgttggtcttcctcctgctgatcaaaataaaggaaatgtttcacatgtttattcattatttaccctctctaccctagtacttccaaaaaaggatctgagatggcttatagtaagacacttgaaaatactgtcagattagtaatatttttaaaggaaaaagcaaatatgcccaaaatgtacgcccatgtactaagagcgtcattttatattatttttctgggcttagtggaagccaaagcagaaaggaaaatgagttttatgataatgattgatgtttaaagtacacatactagctgtttcaatgaaaacatattttattggtaccaatctacaatgtgtttgctcatttccaaagagtattggacaacctagatgaaagatctcttaataaatttttttaaaaaatatgtagaaaaaatcttgatattattgttttgtgaaaccacctttgatgaatgctgaaggagtaacgctagaacagctcatcaaagagcaggccaagtaattgacactccatttttagttctcaggtgatgttatttgatacaagcttagaacttgcatacctgttggaataagtggatgtcttcgtaaatgccgttaatgatggtcccctctgcagagcttttgatgggtgctaaatagcaatcaatttaagagagagcaaaagcctagagtgcaaatagtttatattgctaattaaagagtccatgtgtgttaaattataagcatgtagtcaatatggctgagattctattttaaaagttgataagtcttggccgggagtggtggctcacgcctataatctcagcactttgagagggcaagacaggcatattacttgaggccaggagtttgaaaccagcctggccaacatggcaaaaccctgtctctactaaaaatgtaaaaattaggtggtgcacatctgtagtcccagctactcgggaggctgaggcatgagaatcacttgaacccaagaggcggaggttgcagtaagccaagatggcgccactgcactcttgtcttgagtgacagagtgaggagactctgtctcaaataaataaataaataaaagttgataagcctcgtttttttcacatatgacagaaaatatccgataagtaatgattctctttggggaatattctgatgctcaaattttgtcctaatttgattattttaggacattaccaattaagcaattttgggagaagttgaaagaacagcaaactcaaaacataaacactgttgctttatctcacactctgccaattagtgaattcttatgacttcatataaatctttaatcacttggagacatttttttcatctataaaatgagtaatatggaatagatgagctcccagatcccctgcagttctgacagtctttaatactgttttaccatactgattaggttcaagattgagcaaatcttgatctttgtttcaatttttggttcatagttcaccttaggtcaagcattgattttgggcgcattagccaatcaccaaaagttgggctcccttttttagtaaaatttattctgccagcttgctagaataactactatttctaacctccagtcaaggaagttctctatagttgcacttttaacaaatttaaacccagcttaaactgataaacttttcctaattacctcaacccctcagagctcatcactttcttctttatgctttctctctttaacttttggacatgttaatattcttgcaattatcatgctatattatatttatttgcttcctatctaagcttttgagcttcatgaggaaaaggagagaggcttatttagcttcatatcctcagcacagcaactggcacataagaaagaagaaacaagttgggggccaggaggaggaagagaggaaggaaaaggaaacagattggaaaggaaaggatgtgattggctgctttgtatctgatgtcataatccactgagatagaaggcaattttaacagccaattcgtggttcttacggtgtcataattctactacctagccaggagtgatttgttctagaaaggataatgtgtcaagtacgtagatggaatagggtttttgtttgtttttgagacggggtttcactctcgtcacccaggctggggtgcaatggcatcatcttggctcacctcaacctccatctctcgagttcaagcaattcttctgcctcagcctcccgagtagctgagattacaggcatgcaccactacgcccggctaattttatatttttagtagaaacgggctttctccatgttggtcaggctgctttcaaactcatgacctcaggtgatacgcccacctcgtcctcccaaagtgctgggattacaggcgtgagccaccatgcccggccttggaatagattttaattttgtctaccctggatttttacctacatcagtcagcttgaaagatttttaattgggcattttaagaagccaacaaaagatgagctgaatccactgcctgaagtgagagctgaagtgagagctatgtatatttagttcacactacaccaaacataaatatatgcaataaattacaggggattatattacgcagtaggattttcatcttaatttcaagtcttcttcactaaggacagttgctaacccttagccaggggctgataagaacaacctgtgtttggcttggatgctcttttaagcactcctcatcctttcctggctgagccacggtattcttctccttctgctgtctgtgtttggatcttgtgtctttggatcagggcctgtattactatttgaagaaaatcttttagtctttgctgacccacttgcataaagttgcctttaaatgcaatgtttatccaaggtattgcttaggccctttgtgctcagaggcactttgttcttgtaggtagcaaaacacttctttgtccacttaagtgttttctaacctgagtgttctgtattctcctttcaggagttctgttttgtccttttctctgccacattaagggaaaggaaaatattttctaaaaaacacccattggagaacaaatgaatttattgggaactgagtgggaggcaggttcccccactgacagaaggaagaatgctgtttgctgtgtcataccaaggagcactacccacacagagcagcagttcagaatttttttgtacaattatttcatgtgcactattgattaaactataaaaacaagaggaaattttaaatatatcacaagtgtatcaccttagcccctaaataaactatagaacatttgcaacaaatacagattagaaggagaaaaaacccaaggtagatgtagtgtgattttggagagctgcaaaatatttttcctatcgcaacccaggtttccatcataggtttttcagaaaagaaggcgtcctcaccctccatcttttcagctctgctagctaaatgcaatggcaaggtcatggttctgtgaaaatcccccgaggaggagtaagctcaggacatatcaagctattgcagagacacagtggatatggtctaccttgcaagatgtccttaagcacatcaggagagggatatgggatagcacgagatagtccctaggatgagtgatgttgaaatagatccttttcagcacttttaataaacatttactggatttctagtgtgacacaaccatctgccttaagcatggacagaattaagctcagtctctgttccctagaatctcataatctattcaagaaagagaaaagcaaccatacttcaatgttgtcagttagagtagataaacgttctgcggaaacaatgactcctcctttgcctcctttcccatcttctgaaaaaggatcagggaaagtcatagaaaggtaatgtttagagcctgttttggaaggatggagagacgttcaccaggaagagaagagcaacttgaaacaggaagaatcatagcaaagaggcatgaaattgaatggaggggcagaaaatgacaaatagtagtccaatgtgactacagagtagtcagggaatcagagacaagactgcaaagatagtcctggtttcaactatgatgggtcttatgtatcaggctaaaggaattgatctttatttcataggcagtggggaggcagcaaagggctgtaaatagaaaaactgtatgattgggtctcttttatatcacattggaggtcacagaggttaagtatggaaggggcagaactggacccttgaaagagcacttagaagacacagagatgagggttagtctagtggccttctctggggtatggtatggtgagcattagataccgatgtcagagatacttagatgctagtaatattttttacccaatagaaaaaattaatttaatattcatcagagctattaagtatgtattatatacttggttcttaatgtgttcaggacttagagcaacatggaaaataataacacattacctctgctttgtaaggaactcagtctaatcagaagcaaactgtatatgcatgaaaagtaaagtaacaagatactgcactaagtatcaaatgggtgttacagcaaattagtgcaataatagttaaaaggaaagaggaataaggactggctgtgattgtcaggaggaggtaggactgaggttggttctgaaaaatgggaagaatctggagaggcatgaattcacagataactaaaacagatggacaaataaataaatttcagtatagtgtgatgtgacaatagcagcatgcttggggatcacagagaggtccacacaaatcagaaatgtatgattgggagaaggtttaagaaaggcttttcagaaaagatatcccttgatctgagttttagtggacaagtagagacagctagattaaaaggagaaagagccacatatgcaaaggaacagagccattaagaacttgagttcgggcaagcagatgggggctgcaaatattgcacagggataaagggatagattactttgtctctgattccctgactcctctgtagtcacgttggatgtgtgtgtgggacaggcaggaaacaaggctagaaaggggcagaaggaccaaaagtttctaaccttttggtgaaggaccaaaatttggtgaaggaccaaatataaggagcttaaattttatcatgaaaggtattggagtatggtaagcttgagggtgaggagtgacatgatcagatttgtattttagaaagatcattccagaaatagtatagaactactttgaggtgtctgactagatggtgatatcattcactaagggaacacaggaggaccagattgggaagaaaggttttgagttcaaatttttcatgtgttgaacttgaagtgtgtatttgtaacacacaaacttggtggctttaaacaacagaaatttgttgtcttacagttccagaggttagaagtaagaaatcagagccttctggaggctctaagcgtatatctgctccatccctctttcttagcttctggtagcggttggcaattattggtattccttgcctagtagagtgatcactccaatctctgcttctatgttcatatcatcttagtgtatgttgccattctgtcctcttataaggataagggctcatcctaaattcagagtgatctcaagatccttaaaaacatctgtcttagttcatttgggctgctataacagaatatggactaggtggcttataaacaacagagctttatttctcacagttttggaggttgggacatccaagatcaacatgcttagagatttagtgtctggtgaaggcctgtttcctgattcatagatgtcactgtgtcctcacatggtggaagaaacaaaccaattctcttggatctattttataaaggcactaatcctattcatgagaactaatcatgaatagtgatagctaatcacccatcatttccttctatgatgtgaatgtgtccccaaaaattcatgttcggaaatttaatctccaatgcaacagcattgggtggtgttgccttttgagagctgttcaggtcataggggcttggcattcctcccctcaggatgacaaggtgttcaaggtaacatcctggaaacagagaccagaccctcatcagacaactgaacctgcttggacttctcagcctccagaactgtgggaaaataattttttgtgctttataaattcttcactctcagatggtctgttatagaagcacaaagtggactaagtcagcttctaaaggccctacctcctaatatcatcacactgggggctaagatttccacatgtgaaatattcaggggagacacaaacattcattctatagcaatctgcaaagactctgtttcaaagtaacaccacgttcacagatactggaggttaggacttggatatgcctttttgcagggcactattcaaaccactgcaaagtgaacaaaggtgtaagtgtcttcataatctgactcatactccagccctggggacctgtgttttgtgcttccaaatgctaatatcatgcaacagtcaaaagaaagagcaaaattaaaggctgtgatgtatggtagaaagagcaaagactagtcagatggacctagattcaatactggctctttaggagttgaaaagatggtcagccatttaacctctacaagccttgatttcttcatttgtaaaagaggcattgccaggcacagagttgactttaaatgtcattatttcaggggaaaaaaggctgacaatagtacatttgaaaataacccacattaaaatgtggtcatgtgagtgaattggatctctttaaaagagaatagaaattggcattaagaatagtgggatgtcctgtcagagatggacatcagcgatgaggaaagaatccaagagaaggtgatattcaaatagccaaaggagcatttggtttcaggaaaattggctaccaggtatctcaccacctaagtgggagggaggttggcaaaatcaagtcagggcttagaaattgggatactgggcagatttctaagatatctattaagtttaattactgtgctagacattggagattaaacgatgagtaagacacctaccttccagatagaacacaccatcttttgaatgaaatcagcaggtagacaagataaaaatacaatgcaatctgaagtgctagaaaaggctaggcacacagttaaggaacagatctgtgggagcctctgaagcctttagagaaaatatgacgtttgaatagaatagttcttgaaggatgaataagagtgcgcgtgccagggaagaagaactttcccagcagagagaaaaacgcaaagcttaggaattaaggactagaagataggaactcagaatcagttaaaagcccagttgtgcaaattgatcaatgagaccacaggcagaatattaacacagagccttactgctgactcctgcatcattgggctttaacttagaattttcctgcctaaaatgcatgtttgtcccacagactcagagaggagtgagtctagagatatgagtcaagtggttccagcatttaggaaaaaagaaatgcagagagactgatgaccagctaggtactgactcccactgaattagacagtactagggcccaaaggtgcttattagaagtgattcagctacatgaggaacagttgctattgacttcactgcattttttttcagctaaaataattattggattatatctacaacagggaacaatgaatgtctactcaagtaactcgtacatttgagtggcttcccggtgttcagtaaatgtccgttcaattaggttcccgaggatatacatggtaacactatctccaacactaaatgaaaaatccatccccagtatcgcaggataaaaacatcagacttcataggcctccgaagtcaagcagcccgaaggattcaacgtcctccttgaggactctcagtcttcaagactccagccacctaagtgaccactcgttcacttctgcccacgcagtcaccacgccggtccgcgtccacttgtggtctcgatatcggcccctcccaccctagccaaggagaccttggtccgagaaacaaagagagcctcacagctccggatggcaccgatctttcagcgatggggaacaaaggggaaggggagaagcgtcctcgatttttgagggtgccctttctgaggaatctgcaggcggcccggggtggagcggaatccccataggccccttctggcccctgtgcaatacaacgcgccccaggccaaggtcctaggtgcaggggccgccgcagagcctgagcccgcagggctgggatgcgggtcgtcagggatgcgggctggggaggggagggtgtgagcagcgggtgcccccagtccccgccagggcgcaagcgcaggcgcgcagggtgcggtcgcggaggggcgggcacagtcgggcggggagctcggcggcggcgggcgcgggaagatggcggcagcggcggcggcggctgcagaacaggtctgtgagtaccgccgcggccgcgggctggaggagcgggggaggccgcgtcctgccggctgggcccgcgggagccctggccgggggtgcggggggcgcgggccgcagggtctgggttcggcggggccgatcggggcggggcggggcgggaggagctgtgccccgccgaggatgctggcacaagctagggaccaggagccaggggcggcctcgggctcggcccggcctggctgatcctcggagggggtgaggaggggtctccttccggagagcctgggaggcggtcgagccagcctggaagcctgcgctgggacgtgccagggacgtaccccgttcagccgccagcagagatttggataaaaataaccgcagccccagcgagaaggctcctcttacaagaaacgggtcagctgttgccccggtgtcagcttgccatctttgttttttgtttctgccatctccaatatgcagacatcccagatttcccctcacgctttggtttttgaagatttagtcaccagtctaaaactatctcctgttcacttttaaaaatgatttatccaagatttcctgacctgcattgtaaacttgtaacttagaatggtttaaaaggctcctcatccccccaaaatctagttatacgtatgcatacatgtacatgcatatgtgtgtgtgttaatatatacatacacgtaatcgctagggtgatttattgtaatacagataattttcagtaactttcccccttacctaacttacttttcctttgaacaattatagtagtttctctttaaaaagtctcattctaaaacattgttgaaaaaaatgagtcaagttttgacctttggaacgattttcttagataattaactttttagagacctattagatatatgtcactggagggctcattctgaagataaaagacgtaaaatctctcttcaaggagcttaaagtcatacagccaaatacatgcagaaaaaatcagctaaagacaataggcaggctgcagatttgtaacagtaaaataaaacatagaggaatgagtgaaactgaaaggagacaaaacttcttggagttggtatttaaattgtgccttggctttcctcatttcccgcctaagttatcagcttctgtttcagatgattgtttttccatctggttctatttttgctttacacataagtggggcagtctgatccgttactcagtctccacttcaaatttacgcattacgtctccagccctgaacttaactgaattttccataggcacctcaaactcaaaaatgttcaaaactggactctgtcatacttactattaaaaaggctacaaccatccattcacttgtttaacctagccagaaacttaggaccaaggccattttaagggagctgagaaggacctgcacttggtttaatgttctgctgtcctgggcttgagatttaaacagtgagccccacattttcttttccccctgggccccacaaattatatagccagtcctatttgggagtcatcttcgacccctttgtgccacactcatatccaaacaatcacgagatcctgacagttctacctcttaacacctttccccagacttcagcttcaaagtcaaacctcagtcagtacctcattgggactcttagagaaacctgctgttgatatcttcacttctaggctcttcagttccagttcatctctttttggagtgattttactacaatgcaaatctgattgtataggaaacctattttaactcttcagtagttcccctttgccttcaggataaagtccattgttcttgtcatggtatttatgttgcttactggcccctaagcacatctctcattgtatttcttgcttcatccctacacctatccttctcaccatccacataaagtgaccaaaattagttctcccagagatggttgcctctcaaagtctccatgcttcttcctctgcctagagtgaccttcttagctcttttgcctggttaactcctgtccatccttcaagagttaactcaaccttcagcttttcttagaaactttccctgatgcccttgcctgctaggtggagatgcattcctcttctgtaccctttctgtattgtatgcattgctccactacagcacttgtcatgctttgtgaactgttagtcaccttgtctgtctacctgactggcctgtaattaagctccttgagggtggacactatgttcatcctggtagcttggagcacctggcttatagtaactattcaataaatgttaaatgcatcaagatgaagacagtaatgtgcatggtttggcagagaagagtaaagactacgtctcaggagggatgaattttgtcctttctctcttttatgtggacctatattcaaactttggctaacacttttaagttgcccatctgttagggctgtcagaagcctgaggttcttttttggaacctgactacaaattctgttaagtcttctcttaaagtatctacttaatctctcctttttcatcccactttagtttaggtcctcttaacctcaatcctccattactacaacatccccagcagcttacttactggtactcctctttcttctctctcgtacaaatgcccacacctttaacactctgaatttgtgctcaaaaacctccagtgactcccaattaaatagaacataaagactagaatttgtaccctgctgtccaagaaccttcacaacctggccctacttttccaacttcctcttccctgccttgccatatctgacccatctacttctccccatttccctaacaactccaggtcatcctgtctctcctccctttgaactctgcagtgtgtattgcctagactattgattttggcacctgaacatacagagtgctttattgcattgttaaatattttatgttaacatgtacacaaatcatatctgttaatacatagaggataaggaccctttcctatagttcttttgtattcctatctatggaattagtgtttaagcgtaaagtgcttaatacatgcgtattcaacaactgaattttctcagagctttaagaaataagtaggacagtatccatttctgcccatttcttttgtgctcttgatattcaagattattacccaaaatgtcattcaaccatagtctaggtcagaggttctcaaatcattttggtctcaggttctctttacactcttaaaaaatggaggattccaaagagctttggtttatgtgggttatattcattgatatttactataggagaagttaaaatggagaaatttttaaagtacagggctatacaagcatacattctgttgagtgatgatgccatcacattggtcatgtagcctttacattcatgggcctaggagagtaaaaacagcaaacagtatctcagtgttatttcaaaaatacagccccccaaagggtttgtggaaccctcccaggactccccaccctgcatttgaaaactactgatctagggtaatgtgagctagtcagtgaaattataagtaacaaactatgtcagcctttccggtcttattttcatataaatgaaaatatataccgttgtccctcaatatctatgggggattggtctcaggacccccaaaggatagccaaatccattgatgctcaagtcccttatataaagtggtgcagtttttgcatgtaacctctgcacatcctcctgtatactttaaatccatctgcagattacttacaacactgaacacaatgtaaacactatgtaaacagttgttatactgtattgtttagggaataatgacaaggaaaaagtcgtacatgttctgtacaaatgcaaccattcacttttttttttttttttttttttttttttgagacggagtctcgctctgtcacccaggctggagtgcagtggcgcgatcttggctcactgcaacctccgcccctccaggtttaagcaattctctgcctcagcctccggagtagctgggattacaggtgcgtgccaccatgcccagctaattttcttgtgtttttagtagagacagggtttcaccatcttggccaggctggtcttgaactcctgacctcgtgatccacccgcctcagcctcccaaagtgctgggattacaggcttgagccaccgcgcctggcctcaaatatttttgatccacagtggttaaatccatggatatggatcccatggatatggagggccagttgtatacgtaaaaaaattaataaattattaataaaagcagttactcactataggatacgtatgacaactctgctcagaaacaagctgtatactttgacagtgggactgttgaaagcagagaggaaaaatatcagatagtgaccttgaagtttcttctgtactttccttctaagcacagttatgcccttatttggaactgcaactcaatgtgatttgcagtttattcatggaaaatgtgtcagtaaccaattcagcttgctatagctatgaatttgcacctaatagataaatgcaccaaaacgagagggtatagctgttccattatgttgtatttcatttttagcaaagttccaatggtcctgtaaagaagtccatgcgtgagaaggctgttgagagaaggagtgtcaataaagagcacaacagtaactttaaagctggatacattccgattgatgaagatcgtctccacaaaacagggttgagaggaagaaagggcaatttagccatctgtgtgattatcctcttgtttatcctggctgtcatcaatttaatagtgagtatttgtaagaatactcattttaattgccatggggaattttttatctgctttatagtgaaatcatagactttattttctccttttctatacatgtcttgtctcttactgaattttaatgaatactttattaaaaaaactagtgtgctaatattttcatatattaatttcatttacaaaaaaatgtgcatgggtttatccctttaatggacttaatttttagcaaggatagaattatgaggctcccacctagctcaatcggtagagcatgagacttttaataaggataggatcaactcaatagaagagaactttgccaagatgattttattgctttcacatctccttaaaaatataatcctttctgttttcatttaacttttcctacatttaatgttgcctcctcagctggattttaaaattttaaaccctttgatggcagtaaaaggttatattttatagtcctaagtccccgttgtcaaaggatgcaagaatctggtaggctgattcacactaaagtactgaggacctgataggatgccttttccaaagatatttgcttttttaatgaagaaatccttttaatctgaagttgtgactgtctggggttaaatctgaaactctggcatgtgcatgtacagatattttcagaaggaatgattattgatatacttaagactgatcatgaacatagtctgcagcagttttgaagtgattctttttgtgttattttctacttctaatgcatgcaaggcagtctttttgtatttatgtatgtccaaagcacttctgtctaattcttcactcaaatcagaaagacctcttcctatatatttcatattagatatataaatttttactaggagcacaaatctgaatgcattttattttataaatgtattttatcggagacttctggtcaagatggcagcataaagacatttttatcttcttctctaaaaagctcgttccaaagtaacaatgtcacgaaacagaaatatctttgaagaaagtcggaagcaactgaaatcctaaatcataataaatgaagacacaaagtaggaggaacaatggcagataacttatcagagaggagaatctgcttgttggggaggggatgttggtggaagtaccttgtagaaccctaaaaagccttgggaattagaagttccagtaccttgaaaagcagaagtgaggcaagaactgaaaacagagaagtcatttgaaaatctgtataagaagcagtgagatccctaggcctcctctcccttccagccagcagttagacagctacccctcctaatgtcatacaaaactagtgtgtctctggacacactggaccagagaggattctatctgcctgcggatactggagggtaggggttgggtttccatactgaaacaggaaagtctgggtcctgagactccctttcccacgctctcttttcctcattctccacctccagctccctggcagccaggcaagagacagaagagccttctctgggattcctgatgcatatagaaaaaagatctgaagatactgtcatttggcaagtcccggtgaaaaagccatgtaatttccctcttgtgacacctgtcagtcacaagccctacccctcaaataattttctatgaattcatcactaagtatgaatactgagccagggatcaatagacttttgaggaaagtgccaagaattgaaaaatgatagagatgaaaactcctaaaccatggaaaaaatagaaactcatggaatagagaaaatgccacaaaaactaccaaaaaaacaaaagccctaaattcagtattttcagagaaataagaatatactgcatcaatgaaacaagaataacatgccatttaaaaggcacaagccaggcacagtggctcatgcctgataaagtgagaccctgtctctaccaaaaaaaaaaaaaaattaaaaggaacaattaagaactcatagatatgcgcgtgcacacacacacacacacacacacatacacacacacacagagatgaatgggtgggtgggtagatggatataggtaggtaggtaggtaggtaggtagatagacagaagacattagaagataaaaaaactcttccagaaatttcaacaaaattaatcaactcaggagctctaacatgctgttaataggagtttcagaaagagcacagaaaacactgggggggaaatgatcaaatacataagtcaagaaaatttcctagaacagattgaaaactaccatactgggtccagcgtaatgcataaaaagacacaacaaggccattattatgaaatttaagaaaaccagtaataaaagatcctaatatcttccagagggggcaaaaaagcaggttatgtataaagaatacaaaatcagaatggaataggacctcccaaaagcagcattgggacctggaaggcaataaagcaatggctttcaaaattcagaaagaaaataattttccatctagaattgtatacttagccagtccagcaatcaaatatgaagcattataaagacgtatttttgccatgcacactttccaaaaaattttacttctcatacattgcttagaagccactggaggatgtgctctaccaaaagaaagatgaggatacaggaaactgggtgtctatcagaagagaaagacaaaaggaagttcagcatgaacgtaagggaaagtttatgattacagctgtgcagggggcccatacagaccagtccagcccacgcagaccaaaccagaaagatacaggttccagaaagatttcccgagagagaaaaatagaactaatatattatctgagaggctcagacctacagaaaattgtattgagagattttacagaaatagtggaggatttgagattaattagatttttaaagaaactaaggaaaatgaagtattaaactctgagagacaaggtacaggaaagaaactgccattataggacatatttggtttggtaatgaacaatatttatatggttgtaatactgaaaataatgaccttggatttaattaaaacttgagattggagctggaaaagaaaagagatataaatgagctaaatttatcatctgctaaaatagaaaattaataataaaacctaaattatgataaatgaagaaataacatatttagaagaaatatttgttagatattttagaaatatatgtttagaagaaatacatatatttagaaataaggagataaattctagatgaaatagctaaatttgttgaaagtgattgttcctgggaatgagatgtggagagggtagaaaaaataagaaactattcattttaaattatagacctttagcacattttgacttttagctatttgcatgtaataccttaataaaaataaaattcgttttgtttataagtggaaaattaattgatatatttacctcactgataaaacattttaggaggtctttaacattttggtgataatattttctatttgttttccaattacattaaatgtatgcggcctaccaacagcggacttgtgttctttttcagataacacttgttatttgggccgtgattcgcattggaccaaatggctgtgatagtatggagtttcatgaaagtggcctgcttcgatttaagcaagtatctgacatgggagtgatccaccctctttataaaagcacagtaggaggaaggcgaaatgaaaatttggtcatcactggcaacaaccagcctgtaagttgccacattaactgaaagaaatgcaaacaggagaggggcattagagaaaaatactttgcaaaaacctagttgattattggaaagagatattttcccttagaaaaattagtatatttataatatatctataaatgtatgaatatagtgaatacagtttaaaacatccataaatattaatatttaatactactattgcttttatcatctgttaaaattagatgatttcttaatatttgagattttgttcaatggtagcattttctatgacagatgtaatttgtatgagaatacataggttactcttttctcctccatatgaggaagccattaagaaagcactttcccaggtgagaatactctgtagttttgggggctcttgaagagaatatgccaatctagtcagtggcatcccatgccaagagttgaaaacatagttttcaactgaataaaacctcaaggaggtattcttaccaccacccctgcctatcttaggccttgggccatgttcctccatgactcatgcatttttgcagagctaatgagcaaataaatgtataaaccttcattctaaagaactcttcttccaagtggatggagggagaacagacagagttaaacgtatttgaagttagtctgttattggggtttttaaatttctgtaatttttgtaatttttaaaatatattgttcaggaattttgtttgcagtcttctttgaaaatatattcacaataaactgttttttttgaagattgtttttcagcaagggacaacaaagctcagtgtagaaaacaacaaaacttctattacaagtgacatcggcatgcagttttttgacccgaggactcaaaatatcttattcagcacagactatgaaactcatgagtttcatttgccaagtggagtgaaaagtttgaatgttcaaaaggcatctactgaaagggtatgatttattggctttgttttactaatgggagagaattattctctagagttataaagtgggaagagagttatactgttgttgttttttttttgagacggagtttcgctctgtcgcccaggctggagtgcagtggcgcgatctcgactcactgcaagctccgcctcccagattcacgccattctcctgcctcagcctcccgtgtagctgggactacaggcgcgcgccaccatgcccggctaagttttgtatttttagtagagacggggtttcaccgtgttagtcaggatggtctcgatctcctgacctcgtgatccgcccgtctcggcctcccaaagtgctgggattacaggcgtgagccaccgctcccggctgagagttatactgttttaaagtagtataaaagaatatattccagaacaccggaaaggattaattctagatttgtaattaactagcttgtgtgatcattatcaagtcatctttatctcaatttccacatctctaaaacattaatagaaacatttgactttcatctctcatgactgaagcttctatttctctatctctgataacaattctcacattaatttagaaactctttttagtacttgttttttaaattttcagattaccagcaatgctaccagtgatttaaatataaaagttgatgggcgtgctattgtgcgtggaaatgaaggtgtattcattatgggcaaaaccattgaatttcacatgggtggtaatatggagttaaaggcggtgagtattcttttaagagcttaagagaattattaggttcttgggtacataaatccatatgtggaatagtatacaattattgaaaatgatataattgtctattttttgacatggaaagatgttcaaagtgggttgtgaagtaaaagaaagttacaaaacaatttgtgaaattcattatttttatttttcagaacatatgtatgtttataaaaacctagcagggtgtgccagaatgtcaacaatgtttagctgtggatagcaagataacagattatttgttttatttttatttctactagcctgtattttctgtttctttctctctttttttttttgtataatgatcacttgtattgttttagaaggcaaaaaaaaaaaccttctaaaagagaattctggaagatcaaagtaaatattcatgccttggagttgttgtttttaattaaagatttttcacatccctccctgagtttcatatccaatgatgtgaaaaaaaacaattagcaaatttataaaattattttatttagatatttttattaaaaatgtatttttaatctattattaattgtaaaggaaagaggtttttgtctttatcgtggctgttgaaagtgaattttctttgtgcttaacagattaaatctgaactttaacaggtatggtatttcatgtgccataagtccaaaaactttttaatgtctcacaattctggtcaaagtatacttattcaaaatgcctttgggtacctgcaatatgctatttaattaaagcgaattaaatttgtcttaccaagtattacatgacaaaagtgaacttaaacgtagggacttatcattctttcttattaaaaaaaatttcaatttcatagttcctgggaaaaatactttttaaaagtagttgttttacttttataagcagtttttcccccagaacacataatcccatctctaaataataaagatggacataaaatgtaattcttgccagaaactcagttgcctacagagttaatttgtatgtatattgtggtgtaagaagccattcttctaagaacactgttgaagaatagccacagtacaactgctgttctcagcagtagaaagtcacagaagcaagagatttgtttagagaccattagcaacttaccaaaccttttatttttttctacctgccacttcttgtcccattctaccttgtagttaatatgacaaatatttaaatactttgaaatatacatatacacatatcagtttctctactgttaaaggaaaataacctagtattaaaaagataattagctttataacttcgttaatatcagtggttagttctaaagtgtataagccaatcattagaaataattttatcaattaaactgcttttttgaaaaagctgtttaagaagcaatttaggccgggcgcgatgacttacgcctgtaatctcagcactttaggaagctaaggcgggtggatcacaaggtcaggaattcgagaccagcctggccaacatggcgaaaccccgtctctactaaaaatacaaaaattacctgggcgtggtggcgggcgcctgtaatcccagctacccgggaggctgaggcaggagaatcgcttgaaaccaggaggcagagattgcagtgaacccagatcgcgccactgcactccagcctgggagacagagcaaaactccgtctcaaaaaaaaaaaaaaaaaaaaaaaaaaccaacaacaaaaaacaatttaaagaaagtaaaattaaatgaccacaagatggcagcattggaacaaattggaaaactagtcacttaagaattactgtctattccatatactaccactgcataatcagttaaccatctccattatttataaccaattttctctctttgctttaaataccctctgtaagccgatgcctcccaaatttggaattgtgctttaacctctcctctgaactaagagtcacatatctagctgcctgcttaacattatccattttgatatctgataggcatctcacatttaacaattgaaaagttagattctccatccccacaagcatgcatttctttcagtattcttgtaccattaaatgacacccatcagtccatagcaaagccttctggctctaccttcagaagatacagagtcttgctgtttctcaccacctcggccatcaccaccctgatgtaaactgccatcattccctgcctggatggttggaacagcctcctggctgatcttcttacttccaagtattcactcccatagtctgttttctacccaacagccagagtggccattttaaaaagatcaagtcatttctgtattcagaatcctccaaatgcttcccgtataatttggaataaaatctaaagtctattccctgcctacatgtctgatcctcagttatttctttgactcatctcctactggttgttcccttcaccctccgtgcttcttccacactggcctcatagctgtccctggaatccaggcacatcttcacctcggggcctttgcagacactgttacctctgctttgagtacccttccccagttacctagacagcttcctccctcacttcctctagtttctgttggaatgtgaccttatcaaaccacaggtggtccttcctgagcaccctgtgtaaaactcagtccccatctgctcactctctacttatcctgctttatttctcctcatagcatttatcccacctgatgtcttatgtgttttactgttcattttttttattgtctccccctaccccattaaaacatcaactcaataagaacttgggctttgcctgttttacttactgctgtattccccagcacctagaatagtgtctggcatacagcaggcactcagtaattatttgttgagtgaatgaaaagaagaaaggaggaaagggagaaagcaagagagtcctaagagtcactaaaaagaaggattttaaggaactacaataagagaatgtttctggaacagtgggcgtgaagaacctccagactagagtgcctggtcttcaaattatatggtttgaatcttcatttgcagtgttgcaaaaacattggaaattaaaattaattccctctaggaggaaaagtcttttttttttttttttttttttttttgagacagtgtctcgctcagtcacccaggctggagtgcagcggtgtgatctctgctcactgcaagctccgcctcccgggttcacgccattctccttcctcagcctcccaagtagctgggactacaggtgcccaccaccacgtcccgctaagtttttgtatttttagtagagacgaggtttcaccgtgttagccaggatggtctcgatctcctgaacttgtgatccgcccacctcggcctcccaaagtgctgggattacaggcatgagccaccgcgcttggccaggaaaagtctttttgtactcatgatcacaaacttaccaatcagtacctttgttatagttctcttaggacttacaaatgaaaatgatctgaaactttatcaacatcaattttattatgaacttaggaattctgatgtaattttaactaacaatagaggaattatgttgcagatttatttacatatgttatggatatatgaagtgaagaagtcactcattgaatcctgatattttgttttttattgttgctgttgttgttttgtttgtgactttactctttcttactgcttgcttttctcattgatatttcaggaagttttgtttactgactttgttctgtaccccctcatggaggtaaataaatcatattactattctcctaataggaaaacagtatcatcctaaatggatctgtgatggtcagcaccacccgcctacccagttcctccagtggagaccagttgggtagtggtgactgggtacgctacaagctctgcatgtgtgctgatgggacgctcttcaaggtgcaagtaaccagccagaacatgggctgccaaatctcagacaacccctgtggaaacactcattaaaagaaccccagaggtcaccaacatgtttatatcttgacttgacttttttatgcatgcaaatcattgtttttacagagtttgtgataactcataattattttaatggcagagcactgctgtatctgttttatggtctacatagttaaaatcttctcagagagcctaaattctaatacattttattaatttatactaatcttcatatttactgttctctaaaataattatgagaagcaaataaaatcaaaagtcatgtttaaagacgtgtttttaaaattccactatcccttttctaaaggttaaaggtctgaagcagctgtttagattcactgtaagtaaactttggtaactctaatggggatagacccacttaagatatttaaaaaggtatggcatcagcgtttcatgctctgccttttagcttctaaaaggaaagatgcagatttctagtgcattaagcctgagccatattctcacatgcaagtgaagtcattaaagaactttacatatgtgagatagaaacaatggttccttagttttgcactgggaagaaaatattttgtaaaagaatgtttatttgaaataatgataactatcaattgttcacaatgtggtggaaattaaaacaccatctcagctttaacttttaaataataatgataactatctttattgagcatcttctacatcctaggcattgtcctaggcattgcatgtttatatccccaattctcaccacaaccctgcaagtaggtggtattatccaagttttacccattaagaaactgaagatcagagaagttaagaaacttgctcaacatcatatagtaagtagcagagttgggattggaattcaggcatgactcaaacctggatgtacttgattccaaatgccatgttgttttcactctctgcactgactttttaattatttaaaactctagaaagatgaacaaaggttaatttaaacttacctaagaagatgagaatcaaacaaaacagatatgcttactctagttaaaaagaaaataaatctcatgtcagacccagaaaggaccaatcactgtccgattgtaagctatgttgggccaattccaaaatattatacgatggagaggtcaaatttacctacttctgagttacctcagtttcccaacaatggaccttggcacactggagtaacaatacataacagagttgccaagatatttataccctcagcactcggggcaacacagtggaaagtggggaggccatagacccaaacaagttctttgggccaggcatggcctagtaagtacaccatgcctcgaaaataagtccagaagcactggactaaagagtgctaatgcaggaaataatacacataatttttaggtaaggataataatttatctctgctcctaatattactatcccattgtaattatttataaccctcaagccagttgatttttaatatatttgattggaaaagaactctctggtattattaagactcacacagaatcagggacagggcccccaaaggagtttgctgtaaaataggcagtagagttgtggcatgggcccaaccctgcattcaagtgtaacagcattctgtcagggtcactttgaattgtgcacataagaaaaccaatacaaaaaacaatttgtattcaatattgtcacatttctctctggtagaaaaatcaaataccttagagattatgaagtcattaatttatactgaaattggattgacttactacctaacactgagcgctgtttttaaatgaaaagaatgagatttataaccacttgagtgttattgcagtgatatttgaactcatttgaatatattcagtatcatttaatgtctgaattcagaaaaaaatgccgaaatttttattcagatggtccataaattaaattgcatattcattacttatctgctctatttagatttattttaaaagtttatttaagtaaatatttttataaaaaccagaaaacactgtattacaaaatattatttattaaatgtagttcaggaaataatctatttttactcttttttgggaaatacttgtgtttttgatacatctccatgaagtgcttttgagaggagaggctattttgatgtttttatacaactgaaggttaacagccatagcattttatgatactttacaggtagtcctggctttttccctgaaacataagcttggaaaatctattagaaagcagaacagggcaaactctccattttacttatggcttttctaatttttaattaattaatttatttttttgagacagagtcttgttctgtcgccaggctggagtgcagtggcacaatctcggctctcggctcactgcaacctctgcctcccaggttcaagcgattctcctgcctcagcctcccgagtacctgggactacaggcatgtgccacagttcccggctaatttttgtatttttagtagagacggggtttcaccatgttggccaggatggtctcaatctcttgacctcgtgatctgcctgccttggcctcccaaagtgctgggattacaggtgtgagccaccacgcctggccggcttatttttatccacagtaaatcttcagcaactcattgtctccaccagatagtatttttctgtaaatgaaatgctgacttcgcctcttcctgctgtatgctcatccctgcactgagcacagatatgacaagcagtagccatgggggaggtgggtgacaaagataggaccccgggagggggcgcaggtacatgctagtttcaattaccacagtattctagagacgggttgcaatgacaaggggggcaaatgaaatcaatgcaagatttcttaataatgggcagacagaaaaatgtaaaaccacacaaaacggactgctgataatattttaaaatatacttatttgtcttctttttgcattgtgaaaaaaacaaaataaattttgtgtgataattttgatgatgaaaggtggaagttctacctagatttgaatgagtgtttttttaagggaatgagaatgtcatggtgctaaacctgacaaataagagatcattgaaatgctgaaaattttaacagtcttcttaaaagtattgagggggcaaaaattaccaattatggtatacaaaaataagcctataaatgtgtttcacattgctaacttgagtttcagttgattcagtttgtaataactagtaatgagcttctgtttacaataaaaattctgtaaattgtttgctgttaattttttaagggttatatattaactgttttctacttagtcatgcgaacgtgatgaatttaaatatggcttgagaatgggacgctgtcagtatttatgtaatctctctggactcctagaactcaaagttagaaagttgtacattccaagttttgaatgccctcctctctgtgcattgcagaaggcctctctccagtggtgcttccctggtgtcctaggggaaagtgcacactgtcaccatggcaggaggccaaagccggagatgaaagggtgagggctggccactgggcagccttgatggcaggttgggtggagcctcaaaggttcaggtcttaaatccctacctggcttgatccagatatccacccatttgataaccacttaggatacgaaggtatgtcttagaggcattattactttccaggtcttgtccttacccgaaatagcctctgttgcttttttccttcagttttgccaccctttcttttatgtataaatgaactcttcatttcctttctataatactttgtttttttgtgctgccttcttcctatctttcacttgctgactcacaaatgtacacacccagtatttctaactgcttcctcctacttcagcttgactatttccattttgaaatttacattttgcctaattgtttccagttttctaagcaactttttctggagttctcagtggttccttacctaatacatataaatttataaatagtatgatttttttaacaaattaatacctttcactttaagatataagattccttgtctagctgttttgaactcaaacctaacatgtataaatctcttcagcttaaaaagaaccagggcaattttaattcatgtccccttaagaaaaagtatttttcaaccatgtctttctcttcagcactacaaagtaatgtacctgtgaatggtgactatatttttttgttgctgattttgttacattagcttggtgcaccattgtatatataatgatctcagctttgaacgtagaaaaaatatctttgttcctgggcaaatcaattcaatttctagtattgcataagaagcacactgtaaaaataaatcactcctccatgctgtaggctacctttgctgttcatggccatgtgtacctgaatttaaatgcccttgaaaatatgggaggattgaccttgtatgaaacaaaagttttaaagttacattgtaaatttcattcacttcactccatgcattcatttacacacaaacaacataacccagtgacagactgcagactattaaaaatgtaaaacattggatagatagatagatagataatgttccttttttttttgggagttcagaacagatacaaagcaaaacaatagcaacgctgaatgttactaatgtgtatcaattccttcagtgtttactgaaagatttctgtaagaataaagacaaatttggaggctaaagcaggaaaaatgaccaggccataagatgtgagatgaatctggaaggatacacaagactgtggctggccgggtgtggtggctcacgcctgtaatcccagcactttgggaggccaaggtgggcgggtcacctgaggtcaggagttcgagaccagcctgaccaacatggagaaacctcatctctactaaaaatacaaattagtgagttgtagtggcacatgcctgtaatcccagctactcgggaggctgaggcaggagaattgcttgaacccgggaggcggaggttgtggtgagctgacatggcgctcttgcactccagcctgggtaacaagagcgaaactccatcttaagactgtggctaagaggaaaaggcattgaacttggaactgggaatgaactgaaagtgaatttcagtatgcgatatgcatagatcattctttgcagaagccacatcttgtagtggctccacatgaacttatcaagctaggtcattaagtttacctagataacacaggctttgaataccaacctgagggatttggactataggcaataaggagccctttgaggatttcaaatgaaggaataatataggaaatacgttattgtaggaaaataatcctttggagtcacctaggatggatcacaaagaaggaaagtcaagaggcagaggcaagaaagtcagttaagccattttagtatttcagactgcagtgatgaaaactaaactgagtgccattagaacagaaaggaagggacaatttcttggaaactcatatactcaataatgtgattatttgtacacacagtggcttttaagtggaatttagtttaaaacaaatcacaaaaattacccatttttaaacttatttttgtgatacattcagccattgtaatttgtacacacttctttttaaaaactttgaattttttctcaaaaatgtttggtacaaaagatactcaatgtttctgtatcgtattacatcttcatggcttggagccagaacatgtatttgataacacattatgttgtatgtatctaaatgatttcataatgatttgaaaagtcacacaagccacacagcaaaacttgtatttcttctagtcatgaaaagtaagagcctcttttgtgagttaaactttttactcatagagttatggagggtcacggtttagtgtaactggttgtcatttatgtaataaactacatggttgattactatgttgtagataagcataatagactttgctctgtattaatggcctgcaaagaaacagggaagtctttaatcttggtaaggtttcattcatcccaaagcacactgtggagtgaaaactactggaaaagcagatgcagaggtgaggcctaactgaatatgtattttctgaaaaatcaggggagtcctttctttaaaatgtgacataaatgtaattttatactatggctatttcattttggtagctacattttcatgccccagtaagaaatcaaacattcgcttaaattggcaaccaagacaagataactttccgaaatcttaaattgaaaattaaatttgctgcttattgctgttagtttttatatattattgtgaataagtcaattcattttcctttttccaggcattatgaaaaacctctatttcagagtcattaccatagttataggtctttattttactggaataatgacaaatgcatcaagaaaaagcaatattttattcaattctgaatgccaatggaatgaatatattctgacaaattgttcttttaccggaaagtgtgatatacctgtggacatatcacagacagcagccactgtggatgtaagtttcaatttctttagagttctcttacagtctcacacgaaaaaagaagagtggaaaataaaacatctggacctcagtaacaatctcatatcaaaaataaccttaagcccttttgcatatttacatgctttggaagtgttaaacctcagcaacaatgccatccactccctctcattggatctactcagtcctaagtcctcatgggtgaaacgccacagaagcagcttcagaaacaggtttccattgctgaaggtgctcattcttcaaagaaataaactcagtgacactcccaagggtgagtacaattttaactaggcagagaaacaatgcttacgtggagttgtttcatgttcataagaattccacatttgttttcaggttcaagggacagctgaaagtaaagcaatttgatcagagcacatataataatgtttcttagtggcattggaagttatagtgtgtggaatttacagctaatgaaatttagtctcccattagtatatctgacattaatgttatgtgcggttatcgagacactaggaagtatttaagtgctaaataataatgagtgattgtaagttacctactttaattatcatgtattagttaatatagaaaagcactgagcaataactagttcaaatacatttaatatgtaatacaattcaaattaaatgttgccatattataatatttttcttctttgagtacattttgcctcagtctatctagttgtcctccaaacttacagcagaagtatcctaatattatatattggtatgtaaaccttctgattatcaagtcaaaatcagaattccttatcctagtttctaacagggtactccagatagcctccaattatcataaattctcatctgacattcaatagtctatatgttggagttccttaacggatacaccaatgttttctttggaaaatatatcaagttcataaagcaaaacttcctttgccctttttatattccagagtgctagacaattaatttcctttccttgtttgttttcaggcttgttcactctttgctaagcacctcctttatataagacattattcaaaaaaatgtataaggttattgttctctttctccattccaaattgtgcatatttagtttttcttattatccagttctgacatttcatgtttttatcttcatgctctttctccagctttgctttaagcatcattttggcaataatagcctagcaggtataggaattattacagtcaccatgtcagcagaattgtttgagaagggtgggcgtcttatctccctgaccttctccataaaagtagtatgtcatattttcagtgtaaatgaattgcattttattttatttttattgtattatttttattacaagaagaatacctgttacttatagaacatttaacaactgaagaaaaatttaaagggaaaaattaaagtcattcatgttatatatgttcttcaagtttattatttatgcctatttgtacctttttctttcaaaattggatcatactgtccatatttctaatttgtattttcatatcatagaatattttaataactttatataattaagcaatctcacaaatatttcaaatagttggtttttatatatgcgtatatcataattggtttaatcaagcactaggttatttccaggttttgttttttgatggacgtcattatagctacatatatccatataatataacaaaaatttttaactggtatggtagatgtgatctcaatccacaaactcaagtgtactagagatataaccttctgttgtctgtagtaacataatttccgattctgagcccccattagggggagttgtagggatacttaacatcagtctttcatcagctttcctctgcctttgcctggatttgtacccagcttgagaatcgtatactctaacaaggcatcaaatcgtatactctaacaaggcatcgaatcgtatactctaacaaggcatcgaggggtgagcattccttacccctgctacccagataatatttcttttcagcctcttcagtttggagaaaatttcttctcccttttttttttcttcaaaaccctctgtctggaaatcactttcttctaaagggttagggttttggaaaacaaaagccagaaagacttgtagactcagctactttctgccttgccatatgccttccctgggacaatgaacgtggagcctactttctgtgtgaatggagagaaagagcaagaggaaaatatagggaagtaagagattaacatgtcaaaatattaccccaccacaagagtaaataggaagtgctgagtttctctccttaaggcagatgaattcccctgagctaactgggggttaggactaatacagttccacttaaagaccaaatatccctataaatgcagatacagatccatcttctttttttgagttaagcttttgcctcccaaaagatcaagaaaaatgttcaacttgaagaggagggggaaaaaagaagggaagtgagcaaattctgtatctgaaattctattaaaattctagcaaatgaagacatagagagatgaatgaaaagagatagacggtggaagttcagtgtaaggcatgaatctgattggatataattcagagtccttttatccatagtattttgtgatttaaattattttcccataatcatcatattagttttcactaggttgagtctcctctaacaatttttcctattttatgattctgtgactatggctgagttgctctgactttgaaatcccattttgaggggaactgctggtgagagagatgctgcctagggcatgccctatttttggcctatttctttgttcttcaattcttcactctaagtctatttataggtgacatctggataatataagatttactcattggatcattgtaaggataaaatgaaaaaatgtatctcaaagacctaacttaacatggtatttggcataataaactgtcacaatataaatatatgaaaactacttcagaatcttgtctgaagatttaccttgcaaatactagtttttattattctcttggcataaattgagaataacagtatatttagaaacaaataattaatttttgtctaaatctcaaggttttttttgttttttgttttttgagacagagtttcactcttgttgcccatgctggagaaaaatggcacgatctcggctccccgcaacctccgcctcccaggttcaagcgattcttctgcctcagcctcccaggtagctgggtttacaggcatgtgccaccagcccggctaattttgtatttttagtagagacggggctcctccatgttggtcaggctggtctcgaactcctgatctcaggtgatccgcaggcctcaccctcccaaagtgctgggattagaggcgtgagccaccgtgcccggcctcaagttattttttaaaatgttcaacaactattgaagtagtagcccactataattcatgagcagataattatttgtgtctgactatataggcacttgcattcatctaaaataataataaattagagagatctcagaaagcaacaatcaagcaacctttgtaactatgtaccacatattttaaaatggggactatttctagaaccaatgaaaagttgctttcactcaggaaagcccatttgtgtaagggtgagatatcacacgaactaaccctgtcttcagagtcagttgtggtgtcaccaataagcttcatgttgggaaaatgcccaaaagaggtgctggccaatgcaatttataaaacagaagccagccatgaatttaattttaatgatgcttctaccttcctcccatatttttggaatacagcattcataattgaaaaactagtttaaaaacatgaaaacaatgggatcagtctctggttaatctgtcctaccttcatcaagcagtatttttggagtgctcacagagtaactggaaatgcagcaggaacaacatcttgttgggattccagttaggttgatagaccaaatgtagcagcctcacattaaccaactaagttctagaacctaagaggtaaatgtgttagaaataagataaaataatacctaacatttgaaactgggggaattaaaaaaaatacacagtgtattataaaaaactaaagtatattgtgttcctttattcatagaaaattaaagatttcatcctgattgctactggattatggaattatcaataagcaatgtactcaaaactaattcaggttctaaagaaacaaaaagtatataagacactaaactaagaag

SEQ ID NO: 405 - DNA, 1962 bp, Homo sapiens
ggcacagtcgggcggggagctcggcggcggcgggcgcgggaagatggcggcagcggcggcggcggctgcagaacagcaaagttccaatggtcctgtaaagaagtccatgcgtgagaaggctgttgagagaaggagtgtcaataaagagcacaacagtaactttaaagctggatacattccgattgatgaagatcgtctccacaaaacagggttgagaggaagaaagggcaatttagccatctgtgtgattatcctcttgtttatcctggctgtcatcaatttaatactccctggcagccaggcaagagacagaagagccttctctgggattcctgatgcatatagaaaaaagatctgaagatactgtcatttggcaagtcccggtgaaaaagccatataacacttgttatttgggccgtgattcgcattggaccaaatggctgtgatagtatggagtttcatgaaagtggcctgcttcgatttaagcaagtatctgacatgggagtgatccaccctctttataaaagcacagtaggaggaaggcgaaatgaaaatttggtcatcactggcaacaaccagcctattgtttttcagcaagggacaacaaagctcagtgtagaaaacaacaaaacttctattacaagtgacatcggcatgcagttttttgacccgaggactcaaaatatcttattcagcacagactatgaaactcatgagtttcatttgccaagtggagtgaaaagtttgaatgttcaaaaggcatctactgaaaggattaccagcaatgctaccagtgatttaaatataaaagttgatgggcgtgctattgtgcgtggaaatgaaggtgtattcattatgggcaaaaccattgaatttcacatgggtggtaatatggagttaaaggcggaaaacagtatcatcctaaatggatctgtgatggtcagcaccacccgcctacccagttcctccagtggagaccagttgggtagtggtgactgggtacgctacaagctctgcatgtgtgctgatgggacgctcttcaaggtgcaagtaaccagccagaacatgggctgccaaatctcagacaacccctgtggaaacactcattaaaagaaccccagaggtcaccaacatgtttatatcttgacttgacttttttatgcatgcaaatcattgtttttacagagtttgtgataactcataattattttaatggcagagcactgctgtatctgttttatggtctacatagttaaaatcttctcagagagcctaaattctaatacattttattaatttatactaatcttcatatttactgttctctaaaataattatgagaagcaaataaaatcaaaagtcatgtttaaagacgtgtttttaaaattccactatcccttttctaaaggttaaaggtctgaagcagctgtttagattcactgtaagtaaactttggtaactctaatggggatagacccacttaagatatttaaaaaggtatggcatcagcgtttcatgctctgccttttagcttctaaaaggaaagatgcagatttctagtgcattaagcctgagccatattctcacatgcaagtgaagtcattaaagaactttacatatgtgagatagaaacaatggttccttagttttgcactgggaagaaaatattttgtaaaagaatgtttatttgaaataatgataactatcaattgttcacaatgtggtggaaattaaaacaccatctcagctttaacttttaaataataatgataactatctttattgagcatcttctacatcctaggcattgtcctaggcattgcatgtttatatccccaattctcaccacaaccctgcaagtaggtggtattatccaagttttacccattaagaaactgaagatcagagaagttaagaaacttgctcaacatcatatagtaagtagcagagttgggattggaa

SEQ ID NO: 406 - protein, 104 aa, Homo sapiens
MAAAAAAAAEQQSSNGPVKKSMREKAVERRSVNKEHNSNFKAGYIPIDEDRLHKTGLRGRKGNLAICVIILLFILAVINLILPGSQARDRRAFSGIPDAYRKKI

SEQ ID NO: 407 - DNA, 1642 bp, Homo sapiens
ggcacagtcgggcggggagctcggcggcggcgggcgcgggaagatggcggcagcggcggcggcggctgcagaacagataacacttgttatttgggccgtgattcgcattggaccaaatggctgtgatagtatggagtttcatgaaagtggcctgcttcgatttaagcaagtatctgacatgggagtgatccaccctctttataaaagcacagtaggaggaaggcgaaatgaaaatttggtcatcactggcaacaaccagcctattgtttttcagcaagggacaacaaagctcagtgtagaaaacaacaaaacttctattacaagtgacatcggcatgcagttttttgacccgaggactcaaaatatcttattcagcacagactatgaaactcatgagtttcatttgccaagtggagtgaaaagtttgaatgttcaaaaggcatctactgaaaggattaccagcaatgctaccagtgatttaaatataaaagttgatgggcgtgctattgtgcgtggaaatgaaggtgtattcattatgggcaaaaccattgaatttcacatgggtggtaatatggagttaaaggcggaaaacagtatcatcctaaatggatctgtgatggtcagcaccacccgcctacccagttcctccagtggagaccagttgggtagtggtgactgggtacgctacaagctctgcatgtgtgctgatgggacgctcttcaaggtgcaagtaaccagccagaacatgggctgccaaatctcagacaacccctgtggaaacactcattaaaagaaccccagaggtcaccaacatgtttatatcttgacttgacttttttatgcatgcaaatcattgtttttacagagtttgtgataactcataattattttaatggcagagcactgctgtatctgttttatggtctacatagttaaaatcttctcagagagcctaaattctaatacattttattaatttatactaatcttcatatttactgttctctaaaataattatgagaagcaaataaaatcaaaagtcatgtttaaagacgtgtttttaaaattccactatcccttttctaaaggttaaaggtctgaagcagctgtttagattcactgtaagtaaactttggtaactctaatggggatagacccacttaagatatttaaaaaggtatggcatcagcgtttcatgctctgccttttagcttctaaaaggaaagatgcagatttctagtgcattaagcctgagccatattctcacatgcaagtgaagtcattaaagaactttacatatgtgagatagaaacaatggttccttagttttgcactgggaagaaaatattttgtaaaagaatgtttatttgaaataatgataactatcaattgttcacaatgtggtggaaattaaaacaccatctcagctttaacttttaaataataatgataactatctttattgagcatcttctacatcctaggcattgtcctaggcattgcatgtttatatccccaattctcaccacaaccctgcaagtaggtggtattatccaagttttacccattaagaaactgaagatcagagaagttaagaaacttgctcaacatcatatagtaagtagcagagttgggattggaa

SEQ ID NO: 408 - protein, 248 aa, Homo sapiens
MAAAAAAAAEQITLVIWAVIRIGPNGCDSMEFHESGLLRFKQVSDMGVIHPLYKSTVGGRRNENLVITGNNQPIVFQQGTTKLSVENNKTSITSDIGMQFFDPRTQNILFSTDYETHEFHLPSGVKSLNVQKASTERITSNATSDLNIKVDGRAIVRGNEGVFIMGKTIEFHMGGNMELKAENSIILNGSVMVSTTRLPSSSSGDQLGSGDWVRYKLCMCADGTLFKVQVTSQNMGCQISDNPCGNTH

SEQ ID NO: 409 - DNA, 1852 bp, Homo sapiens
ggcacagtcgggcggggagctcggcggcggcgggcgcgggaagatggcggcagcggcggcggcggctgcagaacagcaaagttccaatggtcctgtaaagaagtccatgcgtgagaaggctgttgagagaaggagtgtcaataaagagcacaacagtaactttaaagctggatacattccgattgatgaagatcgtctccacaaaacagggttgagaggaagaaagggcaatttagccatctgtgtgattatcctcttgtttatcctggctgtcatcaatttaataataacacttgttatttgggccgtgattcgcattggaccaaatggctgtgatagtatggagtttcatgaaagtggcctgcttcgatttaagcaagtatctgacatgggagtgatccaccctctttataaaagcacagtaggaggaaggcgaaatgaaaatttggtcatcactggcaacaaccagcctattgtttttcagcaagggacaacaaagctcagtgtagaaaacaacaaaacttctattacaagtgacatcggcatgcagttttttgacccgaggactcaaaatatcttattcagcacagactatgaaactcatgagtttcatttgccaagtggagtgaaaagtttgaatgttcaaaaggcatctactgaaaggattaccagcaatgctaccagtgatttaaatataaaagttgatgggcgtgctattgtgcgtggaaatgaaggtgtattcattatgggcaaaaccattgaatttcacatgggtggtaatatggagttaaaggcggaaaacagtatcatcctaaatggatctgtgatggtcagcaccacccgcctacccagttcctccagtggagaccagttgggtagtggtgactgggtacgctacaagctctgcatgtgtgctgatgggacgctcttcaaggtgcaagtaaccagccagaacatgggctgccaaatctcagacaacccctgtggaaacactcattaaaagaaccccagaggtcaccaacatgtttatatcttgacttgacttttttatgcatgcaaatcattgtttttacagagtttgtgataactcataattattttaatggcagagcactgctgtatctgttttatggtctacatagttaaaatcttctcagagagcctaaattctaatacattttattaatttatactaatcttcatatttactgttctctaaaataattatgagaagcaaataaaatcaaaagtcatgtttaaagacgtgtttttaaaattccactatcccttttctaaaggttaaaggtctgaagcagctgtttagattcactgtaagtaaactttggtaactctaatggggatagacccacttaagatatttaaaaaggtatggcatcagcgtttcatgctctgccttttagcttctaaaaggaaagatgcagatttctagtgcattaagcctgagccatattctcacatgcaagtgaagtcattaaagaactttacatatgtgagatagaaacaatggttccttagttttgcactgggaagaaaatattttgtaaaagaatgtttatttgaaataatgataactatcaattgttcacaatgtggtggaaattaaaacaccatctcagctttaacttttaaataataatgataactatctttattgagcatcttctacatcctaggcattgtcctaggcattgcatgtttatatccccaattctcaccacaaccctgcaagtaggtggtattatccaagttttacccattaagaaactgaagatcagagaagttaagaaacttgctcaacatcatatagtaagtagcagagttgggattggaa

SEQ ID NO: 410 - protein, 318 aa, Homo sapiens
MAAAAAAAAEQQSSNGPVKKSMREKAVERRSVNKEHNSNFKAGYIPIDEDRLHKTGLRGRKGNLAICVIILLFILAVINLIITLVIWAVIRIGPNGCDSMEFHESGLLRFKQVSDMGVIHPLYKSTVGGRRNENLVITGNNQPIVFQQGTTKLSVENNKTSITSDIGMQFFDPRTQNILFSTDYETHEFHLPSGVKSLNVQKASTERITSNATSDLNIKVDGRAIVRGNEGVFIMGKTIEFHMGGNMELKAENSIILNGSVMVSTTRLPSSSSGDQLGSGDWVRYKLCMCADGTLFKVQVTSQNMGCQISDNPCGNTH

SEQ ID NO: 411 - DNA, 66681 bp, Mus musculus
  misc_feature (1)...(66681): n = A,T,C or G
gaggcctcctcctccccttcaaactgcagtgcctgtcactacggtgtcccatcaatgtcaccattctgccactctgcctgttggtagcttgcttttattttgagacaggatctcactctgtagccctggcttccctggaacttgctatgtagatcaggctggcctccaactctgaagagccccgcttccctctgcctcccaagccccaagtgctggattaaaggcgtgcaccacagccagctgcttgccttcttttgttttttgaaacccaaggtggctcaaacttgctgtatagttgaggaagacttagaacgtctctctttacaaataaatttattttgtgtgtataaatgttttgtgtctgtgtatgtattaggcacataagtgcatgatgctcatggagacttggaaaaagatgttggataccctgagactaaagttgaggacagttttgagacactttgtggattctgggaacaaatcttgtatcctctgtaagcatcaaatgcatttaaccattgagcccatgctttgagtttttaatcctctgatctaggccgtgagatttctcacattagaggcctgtgccacaatgtcagggctttatgtgtgccggagactaggtccaggcctatgtgagcattctgctagcttccaccgctcccacccccctttttgagacggtgttactatgtcacacaggttagcctcaaagtcaagattctcttgcctcttcctctggaatgccacagttacaggtgttagctagcacctggcagcccctagatgtcatgacattgtattgcccaaagaaaagcagtgaggcatggttggcctggacacttcagttgtatggtcagcagattctgaggtgacctcatggggtgaactgagaagaagaggcaagtttttagagttgagaacattctgagggaaggacagccacaggcaaagaccttgaggtggggccatgaccaggaaggtgactggctatgcaaaagacatggctgctggataggaggaatagctcttggcagagactggagagtgaatgggaagaagagggtgggagcagttctaataactgttagagtagaggagcctggtgtggtcggctatgtgtgcagtcccagcattcgggagactcaggcttgagagtatcttacttcgagatcagcctgaaatatatagcaagatcttgcctcaaaaaatgtaaagatttaaaaaaacaaaacaaaacaggctggagagatggctcagcagttaagagcactgactgctcttccaggggacctgaattcatttcccagcaaccacatggtggctcacaaccatctgtaatgggatctgatgccctcctctggtgtgtgtctgaagagtgacactgtactcatatacacaaaataaataaatcttaaaaaaaacacacaatttccccccccacccaaaaaaaaagaaaaaccagacatagtggtgcacacctttaatttcagcacttggaaagcagagacaagagaatctcttgagtttgaggccagcctggtctatatagtgagttctaggacagccagggctatatagtgagaccctgtctctaaaaagtaaaaccagtggggcctggtgtcaagtacgttgaatgccagcacttgggaggcagaggcaggtgaatctctgaacttgaggccagcctggtctacaaatcgagttccaagacagccagggctagagagccctatctcagagctgggggctgaggaaaagacaagggacggaagaaacagctcagtggttacgatcattggctgttcttccagagaccctaagttctgttcccagcacccacatgtggattacaaccacctgtaactaaagctccaggggatctggtaccctcttgtggcttatgaggacaccgggcatgcacacggggcatagacattcatgtagacaaaacagccatacacatgtaatgtatgtgtatacattgtatacatctatacatataaacaatttttttatgtaaaagataaagggagaagaactccaagtgaaccttttttcccttctctcatatgtcacatcctgatctgtttcccctccactctcttcagttctaccttccctgtcccccagatccactttcctccattcccttacaataaaaaataaaaaagacaggcaccccaagggatatcagctgaacatggcataaccaattacagtaagacaaacaaaagacaggcgctcatgccaaggctggatggggcaacccaggcaaaagaggcagagacaccccctactcccacggttaggagcccccaggaacacctagctacataaacataaggtatatgaagaggacctagctgagacccatataatatctgtgtccgttgcttcagtctctgagtccctatgagccctggttagttgattctgtgggccatgttctcttggtgtcctccacccctctggctcctacaatccttcctccctcttttctgaggaattcctctgactctgcctagtgattggctgtgggccgttgcatctgctcatcagttgccggatgaagcctgtctggtgacagttgggctaggcaccaatctgtgagtataactgactatcattaggaattatttcattgacctctgctgtgcctcccccaccccacaattgtgtttggttctgtcctcagtctctgatggtttgatcttcaagatcttcaaccactaccccatgtcaccattatagctttctttttctttctttccttctttcctcttttctttctctctctgtctctctctctctcccttccttccttccttccttccttccttccttccttcctctctctctctctctttctttctttctttttttcgtcctttccctctctccctctctccctccctctctccctccctccctcctttctctctctctctctctctctctttctttcttgttgtttgttttttaaaccaggtgtcaagattcccagacctcaaactttgcatgtaagcagagcatggctttgaactccttgatcctccagctacaaccagaatggttgagattataggcctgccgccctcacatctggtttctgtgatgctggcatcatagctccaggcatgcctactaccaaccgagccacaaccccagcccttccattttggatgtgaaacctggcaaggggcccgcccaggaaggcagcgtcctaggcaactgcttctgttactgctgtctgccttgttttcttcttccttatttacgtgtgcatgtccccttgttgaggatgaagaggggagtatttcctcctgcattgcttcctaacccgacggcaactgcagcctcagttcttaggctcctaaaggagcagcccacggatgcagccatcagccagtcaagtttgtttaagtaggtaagtgagcaaaaccagcattctcccgaacggagggccaacttcaaagtctgggtccaccatttctctttccttgcccctagtggctgtcttcttagaaggtatctttatccagtattcagtctgttagaattgaatgcaagaagagttacaaggatgtaaatagcatgagggtgaggagtttataggtgcttggtatgaggtcccaccgtggggaatagtttcttgggagttggccagaatcagctgagatagactttgtcctttgactagagtcctgtcctcatctgtcaaactggattgtcttcgcttgtgaccttgatatgccttttaacctggttttaactgtgagacccactgcaccgtcaacctgcctctaaatactttgccgctctttttggttggtttacgttttaattatttcgctgggcaacggtggtgcatgcctttaatactactactggaaaggcagagagaggggcaagtgaatctctcaagtttgaggccagcctggtctacaaagtgagttccagagcagccaggacgttactcagagaagccctgtttcaaaaaacaaacagaaagttttaattatttgtgggtgggaatgggtatgtggtgtggatgaacagtaatgtatgcatacctgtgccccgggctgggatcaatggcatacattaccataccatgttagtttcctttttaaaagatttatttatacatgtatgtgtgtatacatatgtatgaatgcctatggaggccataaaggcattttctcccctggagctggaattacagatggttgtgggtaatgggaagcaaacctaggtcctctacaagagccgcaaatactctttttaaaaaaaagattatatatatatatatatatactgtagctgtcttcagatattccagaagagggcgttagattgtgagccaccatgtggttgctgggaattgaacttgaacccaggacctctggaagagcagtcggtgctcttaacctctgagctctctctaggccccgcaaatactctttttttgtttgtttgttttttgagacagggttttgttttccagacctggctgtcctggaactcactttgcagaccaggctggtctcgaactcagaaatccacctgcctctgcctcctgagtgctgggattaaagggatgcacaaccatgcccggctcccagttttactttcattagtatcttaaaccagtccaaagtaaaaactgttacaatatttgttacagtgtatcaatgagctaggtcttaatcaaagcccagcgttagaccagtgacttgttcttttttctttctttcttttttttttttttttaaagaagactttttttaaagatttatttattaactgggcgtggtggcacacccctttaattccagcactcgggaggcaggtggatttctgagttcaaggccatcctggtctacaaagtgagttccaggacagccagggctatatagagaaaccctgtctcaaaaaacaaaaacaacaacaaaaaagggatttatttatttaatgtatgtgaatacactgtagctgtttacagacacacctaaggagggcactggattcccattacagatggttgtgagccaccatgtgactgctgggaattgaactcaggacctactggaagagcagtcagtgctcagtgctcttaaccattgagccatctctccagccccagtgacttgttcttgatgccctctatgtctccctctagtcctcttcataatcttcagtagagttttggggggggggggcggttaggtaagctttggaacttgctgtgtagtcatggttagccttgacctctgatccttttcctctcctttgcaaattctgggagtctgggtgtgtagccacacccagttttcttggttgtagccagtatcatgttacatttgtgtagttaaatgggactgaagctgacaaattttcatgttatttgacctcgctgctttttcctctttggtcagtagcagttttctgtttccccaataacccttaggagggttttgttttgtttaagacaggtcttaagcaaggcgtagtggcgcacgcctttaatcctagcactcaggaggcagaggagtggatttctgagccaccctggtctacagagtgagttccaggacagccagggctacacagagaaactgtgtctcaaaaagccaaaaaaaaaaaaaaaaaaaaaaaaaaagacaggttttaatgtagcctaggctggttttgaactgttgatcttgtctcctcttcctaaacctggtttacatggtactggggatagaacctagatcgttgtacaggcttaagcaaacaatttaccagctgatctggatcacaggccttgaaaggggtgtgtgtgcgtgtgcgtgcatggacatatttgagacaggctaccatacccatttcacatacatcatttggatttcatgtaaggaaggagtttctttcgtccagcaagtgttcagaataacaccacaaatgtcccttaaatttccatagaaagttgtgggtggtggttgttgttttttgttgtttttttggatatttgcgacagggtttctctgtatagctctggctgtccaggacagccaaggctacatgaagaaaccctgtcttgaaaaaccaaaaaaaaaaaaaaaaaaaagaaagaaatcttgccttttataattaaaaaaaaaaagaatgaccagctcatatatatggtgccatcttgtggcaagagcataaatataactaatacatactaatacatttccttactggttaagtagttgactctttttagggggaggggcagagtttgtaacagcaatcaataggactcttcttgagaagagttcgctgtgtagtgctagctaccctggaactcactatatagttcttgttcattttgtttctggtttttaggaactgagtgcagtggtgcagcacttacttgagttgctaaggtaggaggactgtcgagttagctgccagatggggcatggtagtgcacctttagtcccaccacttgggagacagacgtaagcagaccactgagttcaaggccagtctgatctacttactgagttccaagtcagccagttctacagaataagatacacttgattttcaactattttacatttttaaattaatttttacttttatctgcattttttttatgctgaatttattcccatgtggtacatttttgtttcgcctgggatagctttttatttctgtgcgacttcctcttctggctttggaacgattgttccttctcagtgaggatcatctcactgtggcagggggagctcatgtgtgggttaatccagccatgagctctgtaggttcgtcggcgcatcttaggtgccttgttcacctggatgtgttcaatgactagagaatctacgtctaaacccctaagttcagggttactctccgcattgctaagcatgtgctgcaaacattcagcagtctgttttggccactgaccctgtgtagccccattggttggcctgggaatacctacactccaccattataggacattgcttctttaaagtgacatccttcagacacttggtgacttcccacatatgcctacccttgatggcctggcagtttcaccagtgttcttaaactgaacatgaagatttgaacttgtttatttgcatgattttgtaggagtttctgggtcagtagagtagcaagccatcttcataggtcacctcagaatgcttataggaagaaccattttatctcttaaaaagaatctggggtctcttagtttaagtgttttgtctgtgtgtgtgtgtaccatgtgcacggttggtgctctcaaagatcagaagagagttgtaaactggtatgtgggtgttggaaatagaaccaaggttatcttcaagagtaataagtgggggctggtgagatggctcagcggttaagagcaccgactgctcttccagaggtcctgagttcaaatcccagcaaccacatggtggctcacaaccatccgtaatgagatctgatgccctcctttggtgtgtctgaagacagctacagtgtactcatataaatataataaatctttaaaataaataaataaaacaataaattaaaaaaagagtaataagtgttcttaacttgtggcaggatctcagtgtagccctggcttggctggagctcccagggatccgcctgcccctgcctcccgagtgttgggattaaagatttactgcactttatagtgtgtttgtgtgccgtggtgtacatgtgaggtcagagaacaattggagggtgtctgttctccttccaccatattagtcccaaggattacatttaggttattaggcttggcaaacaggtatgtacacccgctgaggcacctgtgagcccctcatatgacctgggtaaagtggcatctctgtaatcccagcacttgcctaggctggcataggaggatttttatgagctcaaggctacatggctttttcccaaaacgaaaacatttccctctgcttacagaaaaacaaacaaacgaaaaaaaaaaaaaggtatgtgggatctgagagctgaagttcagttctctggggatcaggggttgttcttaactgctaagccccccagccacccattaatgttgaaataaaatactaataaaaaagcctccagcaagccgggcgtggtggcgcacgcctttaatcccagcactctggaggcagaggcagaggcaggcggatttctgagttcgaggccagcctggtctacagagtgagttccaggacagccagggctacatggagaaaccctgtctcgagaaaccctgtctcgaaaaaccaaaaaaaaaaaaaaaaaaaaaaaaaagcctccagcttttgcaaggacttgagtctggctgggagctccccatggcgctgactacagtggtcagaagctgtagctccagtctgatgctctcctctctggctcctcacttgcatctactccatccccaataattaagggaaaccttgaaatttcaaggtcttactatgaatcccaatctggcatggaattcttagtcctcttgtttcagggtctgcagaggtgggttacagccgtgcaacctatatacctttttttctgtgagcgattttctgtggttttaagtcttacatgggctcaagttactccatatgagaaattataagtcccacatttatttagatatatatcatgtgcaagtgacattaatattttgaagtcacagtttaataagaactgttttcgtaagataatccaaggttatttgtgttttgaagatgtggattcttgagatgtggatacagaagtcagcccatagttacagaagaggatattctaatgtggggttatgtggctcaaagcttgagtgcaacatctttttttttttttgagacaaggtctagctggcctgccccaacatccagaatgatgcagtaacagacctgttgccataccctgctttgtgcttgatcttaactaacttgttttgggtctctataagtaagcatctaggagcctggcagtggcaggccaggcctttaatcctattgctcagaaggcagaagcaggcagatctctgagttcaagacagcttggtctacagggcgagtttcaggacagccagggctatacacagaaaccctgtctcgaaaaaccaaaaaaaaaaaaaaagtcaggctggtaagatggctcagcggttaagaacactaactgctcttccagaggtcctgagttcaagtcccagcaatcacatggtggctcactaccatctataaggggatctgatgccctcttctggcctgcagatcagagcactcatacattaagttaaaaaaaaaaaaaaaaaaaaaaagaaagaaaaaaagaaagtctaggacagtgtttctcagtctacctaatgtgactctttaatacagttcctcatgtggtgatcccccaaacataaaattattttcgttgtcacttcataactaattttgctattcttatgaatcataatgtaaatatctgaattttccgatgatcttaggcaacccctgtgagaggttcccaagtgaagaaccgctggtctaggaactaggaaggcaggaaagagaagaataaaacaagatcaaagcatatgtaaataaagccctttgattgccgggaagtaatcactgggccttcggggaaagcctacttgttggtgtcctactgcgcatgtgtaatgctacccccccctccgcccccccagctcagaacggggctcttaaaaaaaataaataaataaaaagttaacgtgacgggtgcctaaagtacgcaggcgcgctgccttgagcctgcctgcctcctagttcctgcgcttgcggtctgatgttttctgaggccattcccttggtctactacgtcagttcctgtttgtggctggaaaaggcggtatttccggccagcgggtgggagggggctgtgagtgggggctgggggctggggggagggggcgggggggcccgcgctgcgcgagccgttgggcctgactccgagaaggcgtcgccgccgccagcactgccgccgttgctgccgccagttcataaataaggagcgggaacgagctcagcgtggcgatgggcgggggtagagcccggccggagaggctgggcggccgccggtgacaggtgagtacgccagcgcgtgtccccaagcgccctcccctccgcgatggtcgcgtcctggccccccgtggggcctcgctgggccgtaccacccgtgcccgcctggcggggaccacggacctggaggctccccccctcttccggaacggagtgggggcgcctgctgcggggctgggggggacaaacccagagggacgcggggcgggtgccgtggtccataccactgcggcggcggggggagctctctctgagtgtgcgggctgggggctgccctcggggacatcgggggagacagctccttctctgtggtgccagcctgtccagcttttgaggcgctcaccgtgtcaagtgccgcttgggtgctttgggagccgttcctatagtgcacttagagggatgggagcttctggagaggggtctgggcccagggtggccgtgttggggcagtcagggtagtaccacctagacacgagagagcagtctttgtacttagaggagaacagggtcgggtggagggctgtgatgtttatcatctttgaggcacagggtgctgggaggcccgagtgagtgttaaggggcgtacttttaggggtgtgatactgagtgggcgaggagcgcttttctcttcctgtaatatgcaggggtgggcgtttacactcagctcaccctttcttgaacttctttatgactttggggaaaacgggatcgttactgggctgctttttatcatggggttgtccactcaccactccagaaccctctcagattatttctctttaaggtgtgtgggacatcctttggcaagttctttgcttccgggggtggagatgtgttttagaagtcactgaagttttctgatctctagtctggctccctactaggaaagggaggggctatcgggcttggataaggagaagtgcctctggacctgcctgtcaccttttgggcggaaggtgtgttttaagggacagctctctagagcgaagtggggggggggcatctttattctcagaatttggggcccctgtttctctcatttggagaacttttggcacctggtgacaggcctccccctgctagaaaaccataggttcaggtcaggctgatttttagcctgtttactattccctcctcagagatgcaggtgagagttcaggtactgcctggtgtcgtggatatggatgtgaaggggcccacgtttctccagccctggccacgtggctgcttgtgcctccctgttaccagctcaatctagagtcctgtttacgctcctactagttgagtgataacagttggcctcttggtgaggttgagtgctgttttcccagctgttcgctctgcagaggccaagggtacttggaggggagtgtactttatccagcttggtctgacctagggagaaaggctacgtaatagtgtttgggactgctttaggttcctcacagacctagtttcttactgtggtccctaagcagggaaccccagaagtgtgtggccagtgtccttgctccttaggctagcttgtgatcttggcttgccctgtaacctttgtcctaggtctaaatttcctggaggattggctgcaggccctgattgacctagctgacaagtctggtgatatggtcaagggaacagacagtagccattgatctacagcgttggtgtccgtgcttgccggcctcagtgcggcgtggttcccagagagaaggtgcaggcagtgggtgtcctctagggttttctccaccagggatgggcttctcgacctctccaaggagctttcagaaggtttgcctgatagagttaacaggcgctataaaagtaatgaccgtgaaattgatagctgaccttcactcagagcattcagtgtgccacacactgtggaggatgccttgcggtctagagtagcagactctgttgtcatgctgtcctttttagttgaggaaaccgagtcacagggctgcaccatttcaagtgatagtgggtagtatgtgctatttagtagtcctatcatgctagggatatgataggccttttgcacatggatggcttcatgtaagtttcaaatattatagttgtgtacctatcgttctgtctactttatagagacctaacagtgaggtaggaatgttatgcccaggtcacaggtaaggcaaccaaggcactgagccattgtggcttctgtttgcgactaactactctgtgcccagctttgggcttgtggctttatatagcattttatttctttttgttgaagcaaaattagaaattgcagcctgaaggagaaggtgcttttttccaggtctgaatcagaccccttggaagccaggctgggatttagacgcagaggtcccaggctgcagtgctctctgccctcttgagcctggttctgggtgtctgcattctttggatgttcctgtacttgaaagtttcagcatttcaggtttttcgggagaaactgggggacagaactgaataagacctcttttagccctgagtacatgtgtgctggggacagaagacgctagcaggagagccattccgcgaggtggtgagagcagctatggaccccagttagaggcagggtgagcatgagctcttcgggctgtgtgattggagtgagaatatctacatgcagtagactccgaaggcgctcagctccagctgctgtgaagagccagtgagtgacttaaccgatcgatagaaagcttctaccatggtgccaagccatgggagtctctgcggacactcagaacctgctgtaggacgaggcacccaccttatccatcccctgctttcgcttctgttaggtgtctaggaatccaactctgtccagtctccatctagacattcaatgtcctggttcccagcttctgtaaagagctatgttgggctgacaagatggctcagggggtgaagacatttgctattatgcaggccttgcaacctgtgttcaatcctcagaacccacataagggtagaaggtcagaaccagctccacagtcgtcctctgcatgtcacagcatgtccccaactatgtacatgtacatacacaataatacacacagttttcaaaaaggctatagtgcagtactaagcactgagttcaaatccagccttccaggtgctagctgtgtagctctgagtgggcacttcagccttcttgaagccttatctgagttcagggaggacaatgccttccttaggtggcaacagggaatcctagatactgcagcctcttctatgtctggcgcaagtgatagacaggtatgtgctcagcgtggcctagcaaattataattcactgctgctaggattctgtgccctagctagtttgtagtagtttgtcagaggacatcaggagaaaagcagggctgacgttagtcactttcccaaatgtagagtcaaggtggcacacagtaaagtcagctaacaagtgcctctcggtacaaactgtaggtccttcccacgttccagagttggttcatacctttgttttgtgtgctttttctaaatccctgccacagtcatggagtggtggaaaggttgggagcaggcagggtgttgcatcaggtgaaaatactagggtactgacagagtcccaattctgtccaacgttgtacagcatgtctttaatcccagcgctgaagagacagatgctggtgggtctctgtgggttccaggccagtctgatgtacatagtatgttccagattaaccaggactacatagtaacaccctgtttacaaaacacaagtcttttgtggagctgaaggaaaccaacaggagggtaagcaaggaataggttagctgctaggtggtgaatttgggtgaggccctggggaccatcaggagcttctttgcctaggagcagcagggagaccaccgtgggtgggtgggggggggggagaggatgagcttgatgaggtgtagggatgtcccacagggagaggcctgcgagagtgggtgagtgttggtggccaggggatggggcctgggaaggaatgtggggtctgagaatttactcagttgggtggtaaccttggccttggaggttttcaagcttctgcctagggccaggcactgtttcacaggcctcttagttccccctcgagagaataactgccctacaactgctctggtggagacccactggttgcctcccttttctgtggtttcacactgtgttccccagggccatggctggtacatttaggcattgaggtggggactcaatgggctgacttgtctatgcatctccagttagcctagccagctactgttgctaagtaacagtatgaatggctgtcacactgacaggaagggtccttgccacagtctgcctactgcttctccagttggctccaaagttggaaggaacagggtcttgggccttaccttctagtgagagtaaggaccagtttgtagtgtgacagcatagcaggtcaaggttggtgttatcagggcaagacacatggaggttaggggaaagggtcatgatgatactatttggttttgattagatggtcaaggagggtctattttactaagatagacatgggggctcagcctagaggaccatgatagagtcatgacaggcccggggtgaaaaccttgaggatggaaggaattggctctggctgtcccctagtgcccctgaaagcccctgtacctgtgtggaagcccctgaagtggaaggggatcagatgctgtgtttgtgtagtttggcaccaggggtcccctcagcacaaaggtgcttagtggcctagatgagatgaggatgtcttttagtctggcctatgagccttatccctaaggcttagtgcataggcaggcaccctggtgtgtatgtttccaaggcttgctctggagagagtgaacctcttgggggtctacacagatcccagggatgggggatgggaagaggcatcttgtgtggctgatctcagtcaggcctcaggagaatgcaggactgcccttctgtgggcctctctagcttcccagagctatgtgcaaaaggccctcagccactgggcctccgggctgcatggtggggtggttccgtggcagactcttatggacagccagccaagcagtgagaggcccagcccggggagacagcctaggagcaggaccaagagggagggagggaggacgctagtgtgggaggactgcagggtgggatcagcctggtcctttggggcaggacccactggcagctcggcagctcggcacccacagcagggcctgtgctctgggtgggctgtgcaagaacagcaagctgggctggctaaggagagcctgcgtgccctaagtcctttcgacaagttcctggagctcagctgcccagcgaggaagctcagctacagatgttgtttctgagggtgaggccagaaatctaagcctttctccatttgccacctcgatggccttcctgaatgcagtggggcagctgccactgctcatctcttcccagaattagggctccttcttctcagccagtgattaaacctgggtggctgagagggagccctggttttagcattttgaggttgctgtggagccctgagcatctgggttcattctctgaggtgaagtttgttcagttaaacttggaaattttcctgcagggtcatgggaggcctcaggaagctagtggataagaaagcagcagcctgttgagaaggtacttggttgattgggttcttgctgctgtggttcgtggccccagagagcagagaaggactctcaagtgggtagcctgtgcttgtggactggaggagtaggttcaggatggaagttttgggagcctgaggcctgatgagctatggtgccggcgcacattgtactcctgagtgtgccctgtgcacaagcactgtatccatgcatggcatcctggggtgtgggaagggctcttatttccagttagtaggtgagccacggaggcacacagtgatgcatagcatgctttgcttattttggttgtgtgcggtgctttcacttgagtttattggtgaagatgcccatgccaggtcttttgtaacttgctgccttactaccttgagacaagatctctcactgagcctgagacttgctgtttcagctaggctggctgctcagtgagctctggggatcttcttgtccctacccgtcaatgctggggttgcagacctaaaatttttatgtatatgagtgttttgctaacttatctgtgtaccatatgtatgcctggtgcctttggaggccagaagaaggggtcagatcccctggaactagagtcacagatggttgtgagccgctctgtgggtgctgggagcctttgcaagagcagctcacacgcttaactgctgagccctctctgcagcactctgcctggcgcttctgtagtggctggggagtcaaactctggctctgtgcttgcagagcaagtgctccctcccgctccctgagcattttctcagccctggtgtttgagacaggactttgtaatgaagctcgggctgtctggatctcgtcatcctcttgcctccgttttcccagtgctgaggctacaggcatataccatcatgcctggctatgtgaggtttttgtttgttttcttctgagacaggagttccctctgtagccttggctggtcatgaacttttgctgatggacctgtctctttctttcaaattttgatatcacaggtatatatcatcatacctgtagaaacaatagaaacaagcttgatctgtctacctacctacctacctacctacctacctatctatctatctatctatggcaggcctggagcttactcagtagactaagctggcccctgactcacagagacccacctgcctttgccttctgagtgctgggattaaagatgtgtactacaatgcctggttggcttgtttttatattccactatctcagtaaagttttattgagcccttcctatgccttgtatggttcttgttcctgggatagctcctggtctaagcacactaatgcaagtggcctgggaagggaactggtcttgggaagctcctgaggagagagcaggtaggctataatgggaaatcaggaggggtaggctgggcaaggttgggaggttgagctcagcagagttggctagggtagttggagctgagggagtagtcaaggatacaaggcaagaacttagaagtgaagagtcagggcttcatgccctcaaagtaaggccagggaagcagtgagggtggctatatgaggagaggctggatggcgttcaggtagtggcctgaatgggtgggagatgggtaggcacagagccaaccataatctgctttataaatgggctctcttagggcccagcttttcaaattgggatccagaggccttggtgggtggggcatctggggtagtctgtgttcttcagctagtgcattttcatttagatggtattttattttacaaaatttagcagggtgtggtggcacatgcctttaatcccagcagttgggacacagaggcaggagcatctctgtgagttcaaggcatgcctggtctacaaagtttcagaagagctgaggctgttatacagagtaaccctgtctcaaaaaagaaaaaaagaaaaagaaagaaagaaaaaagaaagaaagaaagaaagaaagaaagagaaaaaacttaatataggcatgctgtgaatcatctttatgatttcattccaaccctagtcactgttaataagccacttcccaggcccttaccctgatggtcctggatttgacagttgggctttgtgcaaaagctgccattttctccaggcttgtcacatccccatgtaatcatacctcattcagaatgccatgccaacacaggcatataaataaatctgactctgtctctttcaagacagggtctcactaaataggcctggctagcctaaaacttcctgagtagccttgaactcacagagattctccctgcttcagtctcctgactgctaccagaccgtgtctaaaaaattgtctttgtggtaacataagcacattcttagtcctattagtgctcaatccaagcttacagacaagggagcagatgtccagaagagccctaggtagcccctggaaggggtacaacaagattctgtgctcactgaggcctccgcctagcatgcctgtgtcctgggagggatgggtatagatagtgccatgatgccttcttggccagagagccctgcccaccgtcctcctccatcagacgccaggtgttacatgccaagggtctctggggctgcatagtagcttctagtcatgtgctctgtttgtatgctaagcaattacagttaaagaaaagggaaagtgtggctctgcaggaccctagctcaggtgttcagtgtctgcacttctgcaaatgcaaaagttgcgttggtttgttctactttaaggacagatgtttcctgcactggttcagggcattgtcctgtgtgatttgtgttcctagtttaggctccagcttcagcctgcttatctgcataatggggaaggtcgcaccacttatccatcaggactcatgttagcttgtaccagctctttgaggagtcctcccacaaataacttgcaatgggaaagcaagccccttctcgtttgttcctgggtcccctctgagcaccagccttgcttagagcacagatgggagaccagggaaggagtgatgacaatgcagggtcagccagttagaggccttgctctgagtgtgcgcatatgtgtgctgatgtctgcagggtgtctgagacagtagtggccttgatatggtagagagaacaatgtgagaagagtgatggcttagtcttgggagcaaaggcagagggagttgcaggcttaggtccgatggcagaagtttagtctcttcggctgcatgtattttagctgtctagatgttcccatcttgacttcttttgtatcagatatggttcctttggtccccaagtgaggtacatggtgtgacctcacgttgggaccagtggaaaggaaggaaggctgtgatgcagcctctcaccttgccatttcaggccacaggtctccatctctttcccagggagaaccaaagccttcagaggtgctgggctggctcactggtacctttctcacctcagcctcaggtcctcccagcacgctcttcttccagctttccatgtggcttgtctgggtcacagttttgctcagatgttaccatctacatgagcctttatgtgacctctccttggtctccatgattttggacatcttgaatgtgctatataatttacctgtttattttgccttctcctcccaccgcaggggttctgtttggtcacagagaaatccttagtgccagtgctggcacagtggacaccatatttagggatccagtgaatgtggagtgtttgtttttacctccacctgggggtctagagcacaaaagctctgggtctagttgttagccctcctggaattatttaaagttctaggtctggccctgtgatgggtagtgtttaggactggtaacagtggggaccagagtagattctgtccctaccagcagaggccacattgccagaggcaagtagaggtctgttttctgagggagggccaggctgagtgtcaagtgtccttgtcattcagggaaggtttccctgaagatggagggttgggctgagagcacagtgaacagtatcctagctaggaaagcagcgaatacaaaggtcctggtaagagcaaactcctcaagggacccagacaagaaatgattttatgtgttggtctgcagaggctgcagttcagaggcaggtggtcgttgacagcctgggtaagggccttgggcgtgttccacgcatgcctgtcagctgtgcttggagaagcccactgagtgcagctggtgttcttggtttgtgtggagagcatggctgtgcagactggaatacttgacatgatttccgggggttcagtgaggggaaggtgtgtgttgggggaggtggtagagaagacaaggaaatctgttctgggcttattcttgtcccagtctctggcagctgcctacaccttcatcctgccttcaatcctacctacttcaggagacagatgggtgggtgggggatgtgtgctgaagaagaaagttaagtcttttaaaagccaccatttcaccagggaggtggagtaggtaacattttacatgttcagaaatacccagtgtctcctccacccaccagagggaataataataatacctgacccctgcagctgccgcttagggagtgttcagtttggatcccaaggccaccttggttcctgcacctggagctctgttagcacggccctgaggcctgttgtgcatgttttacttaagtacctgccttcttgggcactgaagctcagaactggagatctctactgaccctgtatctgattttctagaaggccttcactaaattaaagccagttcggacttcaaaagtagtgagaccttgtcttaaaaatgcacaaaagtactatgaatagcaatctttctctccttccccccctttttttttcttatgttgggatggaatccaggatgcccatatgctaggcaagcatgctactgctgagccattccacttaactctcttggtggtttttattttgagatgggtctcagtaaattcaagacaggccttgaactctctgtagcacaggaaggccctgagcttgtgatcttctggccaaagcctttacgtgatctgggattgtaggcctgtgccactaggcctagatttggtacagaatttctgtgtgtgtgtctgtgtgcatacatacatgtgccgtgctatgcacatggaattcagaagataacttgtgggagttggttttctctgccatgtaggtcctagaaattgaactcaggttgtccagcctggtggtgagtaccttcgcctactaaaccatattaaccaagaaattagtgcctttctggtggcacccacccacaagaggatagataaacaaactactgaaaatgtccaactacaaagggccacggtgctaaagcacaggagacaaaggtcagaagacccggaagaaaaaattaaacaagaaatgattttcagggctggccagctgtacttgctggtgaggaccgatctctctcttatgcaaccgtactgagatgaaagaaggactgaaggccggagtggaaggacgcatgcatcctccctctgagacaggcctcccccaaggaaacagctgatagtgttcccttgtgaccacatggctctgttttaccctttgtggtttactgcatttgagaaagtgcccttctctgcactccatcacagaatgttgccagccatacagaagaattccgatttgggagttgagatggcgcaggagagcccaacttgggcctctgagctgccaaagcaggagtctcctacttgccccgaaaggtgcttgtttcagcttcccatctagaagggcctggccagggtgaggaggactccgaagtcctgaggacctgggtttcaaccccagccttgctgtgtcacgtgtgtggtcagctctgcacagggaggagaggtgattagagacagcccccaaagggttctaagtacaactggtgagatttattctgtttaagcagtgactgagagctaagcatggttacagacacccataatcccagcatctggaaggcttaggatgctctgaggtttagggccagcctggcctacactgtaaggctatttaaaaaacatacgcacccccccccaatgttgctgagtgcataggtaccacactaatcttatgtatcactcagtagcattgtttaagttgtttttagagctaggtgtatggttcaactggtaaaatagaaggatttgaactcaatcccaagagtgtgcttggggtttagagacacaagcaaaatcatcttcaagacattgtctttccatctgtctaactcatgtactatatcttcagtggtattcagaggtcccagtagaagccaaatatcacagctctgggtccagatacgagaggtaattaatacatgacaccaaggacctgagctggcagagttcatgggccagaggagcagagtagggtccaccttgtcctagatgggcagtctagagaacaagctacgctcagcaagacaaggttccctgggcttagactgtgaggtttgcatagacccaacactgtccacatcctccctccactttgggacttgtgatcactaaggccagaacccttccatcctcagcccaaacccttctgagaggttgcaccgtccgtgtctattccctcagaggccttctattccagtatgcttagcttctgagacacactgaagcacctcagtggctccatacacctgcttcttaagggaagaaagccacgggcacaggcaggctctgctcataccactttgagaaccattccagacccttccatcagcaagggaaaagctgggactcttgcctgtctagttatcgctggatccagttatcacaggcttgctgtatcgtgcaaacagtgggtgcttaataaaaatatggaatggctgtaattcttcagacctgtaatctcatctactcaagaagcagagccaagaggattgcaaattcagctcttcttggcctatagagtaagttctaggccagtgtaggtaactggagaccatacctctaagagttaaaaagaaggttggggtctgcttaccgagaaagagcttgcctagtgtgcacaagaccctagcttgagtgcccaattctggaaggaaagcagtggataaagtgagcatatgcagaggcaggcctggcaccagaaacagctcaaaatgagctcgctcccctctgcagctggccctggccactcacccctcagtggcctggcttccctgccagactcactgatgaactcagaggcaggagagtggcagggacctgcacttcccaatggcagtattagtggggggttccttcctgacgctgcagaatcctgctgacacagtggcaatgaaagcctccaccccattttgtttcaaattctgtcacctactgctgatccaggccttatgtcttagaggaggaactgctcttagaggaggaactgctcggaaagaaaacaaataacctgtcattgacagtcagaatctgcttgtggggactcaggacctgggggtcagggatgggggaatggatctattttttttttttcagtagctgccgtctgctgttagctggcccactgcttacaagagcattttgataaaagctgatggtgtagaaaatgtccatatgctcagaggaatatctgccataaaaatgctgcaggaaagggtggctgctgggagactacagggctcagatagccaaattctgacttttaattattactgataatttttatgaccacctcaccagtgtgcattcctacagtaggctacatttagcgctgtgagtttttgaggtttagctctcccaggcagagataatcactgcatctcttcctaactcgtgagatttgtgtgtttcttattgaggcatccttctctgtaaggacgctgttctgttcaccttgcctcccaggtggcacatgtgtagtcagcagctacagccctagctctggccctgtggcacactcaagtgtggacattctgggaagcagcagttagtgtgtgatggagacacagtggctccctgcttgtgtgtgctgcagaagggcagtcaggaaaggtcttcatgtgctcttgagttccacaggcaggtctctgtcccccttctgagtgtcctcagaccacagctcctcagtgaacaggccatctgcttggctgtgctgcctggaatttcatcaccacaggactgcgtcacagacacctcggctgaggcgccacccttagtgggaggacggctggagccaggcaggacgcaggggatcttccaattcctccccctgctcttaactgcctgagctgctgctgccttcttagttgctgaaaggagactgtaaaaagtggctctggtgtgtggagctgtggccagggcccctaccactcagctgggagacccaaggtaaatagcttcccttcgctgagtctgttctcacttgggcatggttgagctcctctggtagggtattgggagtgccactgccctgcctaagaccaccaggttggcagtgactctcagactctgaaatcctgaccatccttagccacacctggcttccttcacatagctttgaacaacaacagctgcggggagggctgtgcattggacaccagcagaggctcacactaggtgctggatctcagagccttcaagaggcaatatcactttgggctcttagtcccttacccagctcaccagcaagtattcacaactgacccgtacctgggcgcagtttaggattttggtgtggggccctcaaccctgggcctgagcagtgtctctggcttcctctgaactctgttctccccttggttcctgaggcttttctcaaacgccgttcactgggcagtgttcctcattattctcagcacctctccaccccttgacattggtgtgtgtgtgtgtgtgtgtgtgtgtgtgtgtgtgtgttttgggggtggtggttctaacttccctcttcagaatgtgagttttgtgaggcctgtaactgtgtcttagtggtgttttctagtatctggcgcccaggacacactcagggaagatgggtggtatgggccgagttcaggtgtttgtacacttgggcctgttggcaagaatcagctcattcattgcttgtcaatgtcagagcggggctggtccactttagtagtgttggtgggtgtggaggagtttgcctgaaaggcctacagttgtactcactgcagctttggaggttgaaacctgagcgtgcactgcttccctgaggcccccaaggagggagaatatcccgaaggtgtaagcagggaggctggaggggctgggcagtcaccatgctcatggtgtgccctcgcttccttggttcaggaaccactcctgggaccgggttggagtgggggtgggggtggggactttgttctgtttcctaagtgcactggggagcggtgaagggtctggacatggaaggacgagggcagatgtagatggagggatgaggctgagactgaggaccatgggagaggcctgagtggggaggagccagggctgcaggacgagtgcagcctgagcagatagtgtgcagggtggggagtggacagctgcaggaatgagacagtggaggcaggctggacagccttgagtgccaaactgaggacctgggaagccctggctggttttgagttgaggaaagacaaagtctttgtttgtttgtttgtttgtttgtttgtttagctgtcctggaactcaatctgtagaccagtgtggccttcagctcacagaaatctgcctgcctctgccttgcaaatgctcggattcaaggcgtgtgttatcatgcttggctcaagactgcatcatttctgagggtctctttggctactgagttgggggcagggaggtaagaccccaggaggatgtggaaaaggatcctccattcagccttagagagggagcgagcggggaggctgacattgatggatggttaggactgagggcccctgagctcctgtgcgtttggggtctttgtagggaagcccattgctgctgtttgggcccacactccatttccttttcagcctggagtccagcttgtgagctcacaccctcctgccctccctgtctctggccaccttgcctttcctttgcttcctcccacttagctcccttccttttgcccagggcctgggcagcctgccactgtcacatgccaggcagtactgtgtccagcccacccgctcccctggggcacgagcgaaagctgatgcccatgctgtccctagagccagctgccacttctccaggggcctctgtagctcctgacctgctgtccgcaaataaccctgggctgggaggggcaggcacaaggcactttgggctccatggcccctgtccaggcccgggcttccaggtaagggcccagctggtggctgaccacaggcatcctcctcccctctgctcagggaacttgaaactcagcagcagcttcggcgtccgttagtctgttggctgttagtccctgaggacagatgcagaggtcttggaaaaggaaccaggaccttggtcaagccccaggacaactctaggcctcagacaagtgtgtgtgcagtaggttcctcgggctgtcagagcttttgagacttttcatcattcttctggtgggaacacagaggtcgcagaggttggggaatgacatgggtctccctgtacttgggggaagcagtagtttgcttaatgtggcaggttgattgggaaagagatgagtgcatgcatgagtctgtctgtcttgggggtaggcagatgctggtggctttgagcacaccctaggtgcccagggctgtctgattcatcctgggttacctcagtgctggggcattgggtgaggcaggggcggagctgtggctacctggctctcttcctgtgcagctataggcgggaaggaaagaagagcttcagtggatagcctaaacatatttgacttttataggaccccatgtttctccctcagaattgggccccaagagaagaactctccccagctccctggttgttcccactgtctggaaagcacaaggggccgcctcagaaccctcacagctcctctcttgtttcttgtagacgatactgtatccgaggagcctcctgcatgtcctgctgccctgagctcactcaagctaggtgacagcgtgtgaatgctgccaccatgaatgaggtatctgtcatcaaagaaggctggctccacaaacgtggtaagggctcacttttgttcagcagattttgcatcgacatcttgtatcctgctctcctctagcacctggtgtccctgccccagggccctagctggataccctgaatgcgccccaggctctgcatctttgttggtgatctcattcatgcccccatcttctaggtaaagaagctgaggtctagacagagtagtcacataaaactcagcccagtgatagtcaacatttatttatcaaatagtcatcgattgtaaggttctgggaccttgtagaggccatgttctgctgggagtggtaacgcagtaaatggacatacacaatgctaggtgataagacgtggcatgtgaatcaggtcgagggactgagcagagacaggctcatggggaggtgacagtgagcagagccttcagaaagaagcacctggagaaagagctacaaactcacctggaaaaggagtcccgagggaggcacaaaaaggacaaaagcctgagacctgtgtgtgcttggggtttctaggaatgttgtagctgtagcagagtgaggtagaagctgggcagagcagactcaacaagccctgccggccacggccttacagatgaccagaaggaagcggagatgctgagagccaggcaggacttagttgtgtgataggaagcagaggccctggtgaggtcatagataaagaagagagtagaccttgagagcccagggtcctctgtgccttgcaccaaatgccatgtgacattgggagacagataaggaagcagcatgtgccaaggagttggctttgtcactgttggccttcagggacattctcctggggaggaagctggtccacagacacttgtattcactcagcgcttaattcatggcatggctcctgtgtgctgggagctgctctagattctggagacacagtggtgagccagccagccagagacctcatctttgtagtgacatgtcacacatcctggaggagattaggtgtccaggcagaccttcgtatccagtggtggcatggcctgtgctgcagagtaaagtcaaacgagaggaaggagggagtgaggcttacagcaggagccatgctgcatctggtggttggggtggtttcctggaagaatgggggaggcccatggttcacaggcagctgtatgtgggtagatggggcaaccagggcatcctgaggggagtgagaggggcacatttgaataacaaatggtgatgtcaacctgtcctgccatccctggccacagacaccagcagtcccaatgaacaggatgctgcttagggccagcagaattatagatgaaaccccattttctgctgccttcacagcagggtagcattcagggtaccccagcccttcactgagccctgagtttgagactgtcaaatgcagccatccaagtatggacatctgacaggttctgaccttggctctgccacttcatcttaatgtgacactgggtaaactgtgccacctgtcttgtgtctttttttggtattttgaaatgggatcttacgttggtaccccaggcttatgccagcattgcagtaatcctcctgcctcagcctccctagtgctaggattcaacgtatgtgctactatgcttggctctgagtctgtaagatgagttaacaattcaggtgtctgatgtcggcaccctttaggcagggtttccatgtggtatatttactgtggtgtcttgattgcctccagaaatgtttcacatacagtaggcactcagcaaacaactgctgaatgaatgattgtgatcgtatgtaatggcagctgtggtagggtgtgtcagcctgttggactcctgtcccttggctggagtttccctaggcttactgggttaaggtgttgggatgtggggaggtggctagagtggtgactactgagtggtggtgaatttgtctgtagaccagacttagctgacaaaacaagtctcggtctggctccttctagggcttcatgtctgtttttgtggtaagggctcagttgaattggctcctggcctgtgcttgtctgttgtctggctcacctgcctagaatacacaatgcatgtgcacacaggtgcactcttgggtcatctgagtgctggctgggagaaggagggctctgttttgcccccgataacagggcatctgtgctaatccgttcccattcctggcggttaaaatggctggtggttgtactggtttattcccagtctgttggtctcaggctgtgcccaggcaaggctgtgttgagttttcatgaatgccttctcagggcagactagcagcaatagtgattgccagaggccttggcacaaggctgcagagctaaagggagaccctgggcctctgatgctaaactggcatgggctcaaggcctggcctgtatgtatggtacctcatactcagcagggtctgagggtatgactgaccggagggtgtgactgccaccagctcctatttgtgactcgactttagcatatcaccaccacctttagcagaacactctgactcccctgctggtgtggaggcagacagtatagtggtcagagggtgaacactggattctagtgtgagccatcccagaaagccagccctataggtctcgccaggaaagtgaggctctctgactccgttttctcatttgactgtaagggttagactgtgaggatttatttttcctttgcctgtaggcttcttgttaaagaatggaacacctcggataagtgcctggctcattagttcacctataccagggtccagataaagaaacagaaggctgggcgtgatggcgcacacctttaatcccagcacttgggaggcagaggcaggcgaatctcgtgagttcgaggccagcctcggtctctcggtctacagagtgagttccagaacagccaggactacacagagaaaccctgtctcggaaaaaacaaacaaaaaaccagaaggacagctttcagcaccccatgccccacccaagctatagctgatacttttagggtgttttgttgttgctgcttatttttgggttttttgggtttttttgttttttgttttttttttttttaaagtaagatgtgttgtagatcctagaccagggccctgtacatgttaacaagtgctctgggctacagccccagcttgagtttttctaactttttgtttgtttgtttgtttgtttgtttaatcaaggtgaaattcccataatatgaaataaaccttttaaacttgtgtaattgagtgtcacttaatatatctatggtacccactgtttctctaaccctggaacccactaagcagtcatttagtctaactcttccgcccagccccttacagcccttgctgtgcctcccatccctgtgcctcacctgctccagacgcaccacatcgcacgcaccacatcgcacagcatcatcgcatcgacactggagccagactctgcctttgcagctggcagcttctacttggcagtggttttgtggctattctgtcttacaccttgaatcaatcctgcatttcttccttccttccttcctttctttctttctttctttctttctttctttctttctttctttctttctttcttggtgtcattgacaactaaatctgaggtgacaaagattgactcctatacagtctattaagtattgatttaaaatagagttttgtgtatgtgtgaggtggagtccagctgtcccagtgtccttctcactggcttctcttggcctccctgagcatcgatgggctggaagtgctttgttagggtttgactcttgcctgccctgctgtgtcatgtttgcttatgccatgatgttgcagttactgtagctctgtaatacgttctaaagttgagaaatgaaggtctttaaacaaatgaactcagtttggctctggggtcccttgcaattcctcatgaatttaagaattagctttttgggctagctcagcaggtaagagcactgactgctcttccagaggtcctgagttcaattcccactaaccacatggtggctcacaaccatctgtaatgggatctgatgccctcttttggtgtgtctgaagacagctatagtgcactcacacataaaataaatgaataattttttaaagatttctttattttatttatatgagtccattatagccttgttatgtagccctggttagtctttaatgcttggtgatcctcctgcctaagccactcctgctcagtgatgtgccaccacctggccttgagctcacgctgctcctcctggctcagcctcctctgtgctgagcttacgggtttgcacaactgcacctggctggtcagctagtctgcccgtctgtctgcctgcctgtcttttttccttcccctctctgtcatcctcctgtttctcccattgttgctgtttgctatgttgcctaggctggcctgaaacacttgcctcacacaggtctcctacctcagcctttggtagctaggactatagagtcatgtgccacgatgcttggcttctctcccacattcccagaaagccagagctctccatgaacttgctgtgaggctgaggatgatagtgaagtcctggtcttcctgcttcatctcccatgcccggattatgcgttgcttaggctggcacccagcttcttattttctagacaggggctttacagctgagccacatcccagctgtgtttggattcttctgtggtttttactatgtagcctcttgtctcctgcaaataaaggcaattccactacttcttccttttcagtgtggatgccttttatatttttgccccccccccccaaaaaaaaagacctaagtgacagttcagctactttgtagaatggaacttcagtcagtcgtgagccgatagtaagtttgcttgttagcattggtgaaaacagacatcctggtattgctcctgacctcagggaaccttgcagtctctgctttgtgacagtgacagcagcaaaggctgtttgtcttgccctctgtcatgttgatccattctgttccgagatatcgagatagcgtctgtcagtcaaggtggtgaactgctttattacagtgacttgttttcatagattctgtcttttgttttctgtttcgagtcattttccttttatctttatatctcctaagttgaattcatagggagttcatcaacttgaacccctttcatttgtagatcttttgggatggcagtggggagcaggttggcatggccattgaacccaggaacctttctttttggcttccttctttctctgatgatcttctcgcacttggttcaggaagccgtcagcttttagaatgcatcatatgctcaatacccacattaattctcctggcaaccctcctgccctgagcttgcttgtttgtagcagtgccaacagcatgctgggtgccattgtagactcttccagttttgccatggtaacttttgtgggctgatcctttgtgaatactctccatccctttgatgtctacactgctgctcttcttgtatattcccatatatgtggccaagggagtaactctgcgtttcctgaaaggcctggagaacaaacattggtgcctcccatctttccctttcctttgtgtttgacagttagcaagtgactggaagacggaggctccagctggtagctgaagtatatatttacttggtcatagtgtacagttctcctcttcagaaacaagctgtccctgtgttatgcaggctggcctcagattcttgcctttgctgtctctgtgtagccattattgcaatcagttttagactgtttggtctcactctagactaggctgccctggagttccctatgtaacccagggtagccctggaacttccagccatctttctgccacagccttcctagtgctgggattgcagctgtgagacatcactgctggctttcagtgttcgacagttttacctacaagaacctttctcacattggctctcatagtcccacctcaccccaggcaatcccaggtaaccccaggcaacctctaagccacttttcatcttcactctggacattttatataaatgggcatagacagtcagacagagcttcttgtcatttgaggaagacatgtcataaattataagcatgccactcctaagttccatgagcatcatagtatagccacgccggactggaagaatttaggtagtatacactcgagattgcagggttgactgagagtcctctgtatactactagcctggcaaaagaacaaaattcaaagtgtgaacagtgctttttacaaaatccctgtcacttacactgtcacacagctggaatattgaaagtcagaatggccctccatgtgtgctcttttgtgattggcttctttgcttcaggcagaagtaatggttcagctgctccatagcatggagcagcaatctgccctttcttctgtagcccagcattgtaggcatatatttttttgtaaactacttttaataagggttccaccccggggcctagcaaacacagaagtggatgatcacagtcagctattggatgggtcacacggcccccaatggaggagctagagaaattacccaaggagctaaagggaactgcaaccctataggtggaacaacaatatgaactaaccagtacccgggagctcttgtctttagctgcatatgtatcaaaagatggcctagtcggccatcactgcaaagagaggcccattggacttgcaaactttatatgccccagtacaggggaacgccagggccaaaaagggggagtgggggggcaggggattgggggggtgggtatgggggacctttgggatagcattgaaaatgtaaatgaggaaaatacctaataataaaaaataaaaaataaataaataaataagtgttccacctctcctagcccaccacccagcagaggtagtggaaaagttattaggatgtgggggaagtgggcctgtttaccaacagttctttgagggcaagtttgatctttctcagcagttcagtcccaaagaaacaccaaatatgactcagcagctgcagtccagtccttttcagcaagcagacaccagcagccatagttgaattctgaagaaactgtcatgctcaccaacaggctaaggcgaggcagtggaagcagcaagttggcgcaggaaccttgagagcagttcttgtttagagctccgggcatcccttaggacagtccatgttggcactgagagcttgctactgccatatttactaaggcagtgttgccctgggacactactgcagataacttcctgccaggtacaacctgtggatcacttgggcccagtgcagtgctccagcctgcgtcagcagatgccacctccaaggttcccttaggagagactctcatctaccttcttcccaatgtggtacccttgtgagtcactgtcaccctgggctgcctgtctgctgggacactgtttaaccttgccctgactttttctcctcttgccttgtttcaggtgaatacatcaagacctggaggccacggtacttccttctgaagagtgatggatctttcattgggtataaggagaggcccgaggcccctgaccagaccttaccccccctgaacaatttctctgtagcaggtgtgtttcagggccaggaggccagagttccacagctcacagcgttgctggcaggtgttagggacactagggacacaagggacacaattatgcttgagctggaacctgtcttagcccgttcaccctcagatctgactcctatcctttcttgctgttgctctttgtcattgggtgtttcctttctggggatagtgagaagtcagggtgcatctcacgccttttggctctattgttctacctggtgtcctgtcttctctattaacaagctctccctcttctctgttcctctagccaagtagatgttagcatctgacctagctgctccagggcttaccacgtcctcagtttcctctgtggtacctaacctggtgttttcttggtgtgtgtgtgtgtgtgtgtgtggtttttcaaggtagggtctcactatgtagctctggctgtcctggaactcactcatactgtagaccaggctggcctcaaactcaaagatctctgcctgcctctgcctcccaagtgctgggattaaaggtgtgcgccaccactgccctggtattttcttgaccagcttgataagcccaataatccccttgtcctcttgtctccttcctcctgtagacccaataccatgttcttgtcatagctgctaagagactgtttcatagactaccctgtctctgttacccaagagttcattctctctgagggccttgctgcagcttctgcttctcctcgggctttgcagtatctggaacccagccctgtgcccaccccttctacagaaagcctttttctggcagctctcttcctgtgcccatggccctgccacatctgctacccgctcccgcttctgatttgatctgccagcccgtctctagcaacttcttgaaagtttttctgtgggtaccctcaaggacccccatcttcaccatatcccatgctgaccttcctgtctccatctgaggcatcctatttaaccgtagatcttaggcagtgacctgggtctggctctagatgcctctccctgccctgtaatccagtgccctttcctccccagctctgctctactgtgctgtagccattaaccttggttaactctctgctgtctctgccttcagcaggaaggacctgtctctgctctacacatcccctccgtgaccccagagacagagacaggttcctcagtgtgatgccagggttctgcccaggtagctgacccacctctccagacctgaggcttctttcttctgtggcctgccttgcactgttccgctgtgtcttactaacttggtccccttgccttccggattaaataccttctctgtctttttctatctggacatgacgctctgagttgttgctgccagtttggccttcaacaaaatatggtggacttatgtatttggcaggctgaggcagcagacctgaacagcttagtataagaccctgtttcacaagaaaaaagtaagctagagccctcgctcagtggcagagtctttgtctgctgtgcattaaaccctgagttccatctctggaaccccgggaatgggctgaaatcacaaaagtaagagcagtgaggaggagccggtgaaagcctcgttgtcacttgtgtcacttgtgtcacttgtacctcatctgtgtagtcctcccacagctcagggtttcgttgtgtccttgaaaagcaggagactgtaacatcccatacccttgaggacagagccaagactgtctcagtttctggcatcatcttgtatgggttggcatataaaaagatggcttggtgaatttggtctataggcagcaggaccttgccttcactcttttcctgactgtacccacagaatgccagctgatgaagactgagaggccacgacccaacacctttgtcatacgctgcctgcagtggaccacagtcatcgagaggaccttccatgtagactctccagatgagaggtgagtctgtacctctctgtgtggctgtcctgagggtagacaggcctgatatgaaggcaagagggataggtgaacagaatcctttgggatgctagtcttcctatttttttctttaagttttttattttacatatatgagtacattgttgctgtcttcagacacaccagaagagtgtattgggtcccattacagatgattgtgagtcactatgtggttggtgggaattgaactcaggacctctagaagggcagccagccagtgttctttactgctgagacatctgtccagcccttaggatgctattctttacctggagtccttctgacataggatctttccaactggagctgagaagagctgggatgcttggtttaaacaccccccacccccacccccacccccacgcctaccccccacttcttcagactctgggaacatatcagagtcctgggaagaaatggagttcttcctgttcatgacccagagatttgccaggtgtattccacataagcactttcactgattctagggcactggtccagagtcagttacaaagatcagtgtagggctagagatggagctcagttcttgagagtctcgcctaggatgcatgaagctgtggcttcagttctccagtactccataaacatggcatggcaacacatccctataatcccatcactagggagatggaggcaagaggtttgcccttggctacatagtaagttcaaggccagcatggcatacatgaaaccttgtcttacaaaaatgaatttgagccaagtgtggtggtgtgtgcttgtgatctcggcacttggcagactgaggcaggagaaatgcagttctaggcctttctaggctacagaatgggatcaaggtcagtctcaagagctgtggccacctcagccccgtgtcccaaccccaaccctgcagcttgcagtttctgtgttcctggcttaggatttctattgctgtgaagaggcaccatgactacagcaactctttttttttttttttttttttttttttttaatgtatataagcacattgttgctgacacaccagaagagggcaattacagatggttgtgagccaccatgtggttggtgggaattgaactcaggacctctggaaaaggagccagtgtgccatctgagccatctctccagctttccacagcaactcttatccaggaaaacatttaatttggactggcctaccagttgagaagtttagttcattatcatggtagcaggaagcgtggcagcctgcaagcaggcacagtgctggagaagctgacagttctgcatcctgatccacaggcagcagaaaggaacactgccactctgggcctagcttgagcataggaaccacaaagcctgcctctacagtgacacacttcctccagcaaggtcactcctactccaacaaagccacctcttaatagtgccactctctatgggccaagcattttaatacaggaatctatgagggccattcctattcagaccaccacagtgcccttgagcaattagagccaaatcgcaccactctgaacttaacgctttccctgaagggtgtgttttggggaacctttctaactgtagagagagcagctgtgctctcactctgttctttcatttcttttgtagcagccacacatgggtgtccctgagttacttagcaagttccagggcgatgtggttccagccttgagctcattgtaggatgtgttcctgtgaggcctaacatgtatgcctttggttccaatacataggatgcattcttagggctaagactgaggctcacaggagtccacacttgtaatgctgaggagggtttctgtccggcatgtctgaagtaccctcctaaccttatgttgtcagccgcttcggttctgagttgtctgagcagggtcaggtttgatttgtgtgtggatgaggctgcccttgaggagggtcttcgttttgtgaactgtctgtccagtggtttctctctcttccctgctggagctgggctgctcttctcattgatgtctctctgtggtagacagtcctgcctactgtggaaatgttcttcctcctactctgtcttcttggacttggctttgaagagcacccctcttgctcgtcaacaaggcagagcctctgctgtacctatgggaactctgagaaggttggcctagacctgcttagcatttcaaatgtagcagtagagaaatagaatgcgtactttctttacctacaatcttattttagtaggaacttgtgttgcccattggccttgaattgatatgtagccaaggctggccatcaacttttcatgctcctgcctctgtcttgaaagtgtttgggactgaccctcttggacagtgctgttctagagcctgcgtgaaacaatatcacaagatcttggggagaccatgatctatactgtaattattgttgcatatctccccaagttaaaaatatatttgtctcaccacagggaaccgaattatcatctcaggccaactgaggtgtaacccagttgaaaactggggaccaaatatggactgccagcaaaagcagatgtaggctgatcgatgctagccgtgggtgttgggtgagtgtgaaggatgggtaagagcttggctcttgaaataggaaagcgaacagtcataggaaagcgaacagtccaggaaatggactcaacagaatatccagagagcaggaggtgaaacaactccagtgtcccagggacctcaaggagttctgtgttagcagagaatcaagggactgcgcttggaagaggggaagtagaggcgctcaaagctggaagcttggccaaagctttggccctcagtggagattcctgcagggcttggcaggcgcttaataaactggggtttgtcacagggttgttaagagattcagaggatgataaacaggaagcctcggggcagcagtacctggcactcactgggtcaggcctgggagagggcattaaccactgccagggagatctgatttctgctttttacgagacaacttgtcctcaataacagagagattgggccgtgctaagaccaggatgaagattgggcttcttattctttctttccttggttccctctgctaatggcgagaatgcctctgcagtggccctgccctggagaccaagccctagattccaaaggaaggcagagccagagacacagagcaaaggggcttccccactctgtggagagggctggtgctgtccttattgccttgttcacagaggcccaagtgtgagtgtgagtgtagggactgcaggatggagaggcaggagacactgctgagaagatactgactagatgctatgacttacacttgctgggcttcaggttctttcttggccttccccaggtagctggaacctagcagcagccattctgccatgcccccatcccacccccaaactcatagagatgcctcctgaatgttgggattaaaggcgagtgtaaaagggaagggtttttattgtaaatatgagggagaacggccagaggcatctggaagatgagtacactgactgtccatggccaggagagaagccaggagcagaacggcgtggtgcacgagatgggcgaggggggaaagagctcgtgcaaaagaacgcagagggagggggaaatagaggagcagcaagatggagaggagagacaagaacagcggccggccggggtgctggagagatggctcagcggttaagagcacgcctgctcttccagaggtcctgagttcaaatcccagcaaccacatggtggctcactaccatctgtaatgggatacaatgccctcttctggtgtgcctgaagacagctatagtgtactcatatacataaaataaataaatctttaaaaaagaacagtggctggcttagctgaaatagcagggaatgggagtctgtgagctgggggagtttagggtagagaggaggtaagaagagctaggatgggctctgaaatgtgtaacaggtgcttgtaatactgagggagcctggaggtcagcttactttggtatgctaataggcaccacagagagccatttgtctcttctgtctgttggaatgtggagatctggagtttcctttggacctgacacctgccatgcccagcacaagtgtgttctgatgcagggaagtttagaggctactcaggaaccacctagactctgcagctcagctcccaccaccacatctagtgtgcttgtgtgtgtatgctcgtgcatgcaagggggtgggggtggggggcatgtgtgcatgctgtgaattgcatgtgggtcagaagttatcttggaaggagagccggttcttttcttctaccatgaagggtccatggtttgaatcagggacttctaaagggaagtacctttactgctgagccaccttgcctgcctttcttttatattatttaaaggcagagtttgagtttatgctcatacttactagtgttttactcttcactcagccatctgctaagtacctctcttaaaaattcagaatacccccgggcagctatagcacgcacatctttactcccagcacttgggaggcagaggcagatggatttctgagttcaaggccagcctggtcatccaggacagccagggctacacagagaagccctgtctcgaaaaaccaaaaaaaaaaaattgagaatgccactgtcctgctggaggtgattgtacaggatgctcatcgctaatctcaagtccagtcctccaacgcttaggacattgcatcctcgtggtgctcagggtatttcagatcttagaacagcctctgtgttcctcactccccccatgtgtagaataagattaaggtgcccaggctgatgggaggctaacaagctgctttaccatggggaatgacagtagctgtctctgactagacaataaagtctatgggaatattctaaaatccaaaggactccaagctagaagcacttctggtcccaagccagtacttaatatatatatccatatatacttgaggtttcctagtttagttctgtgtgtgtgtgtgtgtgtgtgtgtgtgtgtgtgtgtgcgcgcgcgcgcgggcgcgggcgtgcgtgcgtgcgtgcgtgcgtgcgtgcatgtgcacagtacactctgtatagagtgcctgcttctagtctctactgtctaagacagtaactcccactgaatctgcagcctgctgtttctgctagactgactaagccagctagccctaggctcctcctgtctctgtcccttggttctgttaccctctgtccctgggtacaggtgcctggctttttatgacaatgctggggatctgcacccaggttcttgtgcttatacagtaagtatatctcctactaagctgtccccttagtcctgacaatgttgtttttaaacatggattcactctaggtacgtactgcgtcttggacttggtctcacctggttctcccttgtctctattttttccccttatgacagtgatattctttgtttgtttgtttgtttgtttttcgagacagggtttctctgtgtagccctggctcctggaacttactctgtagaccaggctggccttgaactcagaaatcttcctgcctctgcctcccgagtgctgggattaaaggcgtgagccaacacttcccagcaagaatgatattcttgacaaaacaggttagatgctttgtttactacctcatgttttaagtcgttctttttcctttgttttcctgtgcctctctttgtcctgtaaaccagaagtcggtttcagtagggttgacagctacagccctgcttgctgatagggcaaatcaagttatattggagtgtggccagtcgcttgtatatgaagtgtctgtggtggtacttttggtccaccacagcagagtttaagagatggatgaagcacaggactagaaaagcttgaaatcaaactcccagctccttcacagagtttgcagccccctggtctcaagggagacggttagcagtataccaggttagtgtgctcttcattactgagtctaatttcaatcacagtgggacctgcaacttctgcaggaggcagatctggcaaaggtgggctgttgagagccgcatggccccggcctggctcccaattccccagctagggcagtgtgctagcctgaatacgcatagctcctcaggtgtctctccccaggctctagaagccaggtgagggatgacagggatcaggaaaataccatagaaatgccatagctgtgctgggccaggcaggaaggcctgttgtctgtgctgcccctctgcttgttagcgtgtcagactctgtgttcctcattctttccatgtataaaataagatgcccaggctgatgggagccaagggctcctttacatggaatgtaacagtagctgtctgcaatgggaggggcagtggtggtggctagcgagcaggtcttctctggaaggcggcctcaatcacagcttcccaggggaggcgtcctttgccttactccagggctccatgagtggtatccttttgtctgcgaacaaaaaggataagggagtattatcctttcatcctcctgagcccctgcaaggaactgaggtctttcacataggcccttgggtctctggcacagagaggagtggctgtgtgacacccaccagccaggtgtggctgtgactgtggaactgctgttgaccactgtctattggctgggaagggcttggtgtccctgggtcttctttgggaacaggaaggcattgaagtgccagctttgggtgggagcaccctctgccccagacaccatgttgcaaacccttgaggagtgttctggaccaaggccctcactttttctccagaattctgagtgctgcaaccttgcaactttggtccagttggaaccagattggtggctagtctggaggtgggagagcctcttaccacagcctgcctcctggtgcaggctcttgtgctctaaccaggtgtgtcctagatcaggccctatccatgttgtcacaccttccagaggccagtaccttccaggctggagttgtgagatccagagaggaaactgggaggaatgaacatgtagagacgagacactgtccctgctgtcaccagaagcaaccctttgagctgtagtctatcttcctttgtcaacaaaggcaatagtcacactgtgcatcttggtctgcagtctgttttgccttgtgacagtctcaaatctctgtgtctgaaagtctttttatatatttataccacttagatctgtaatttttagtccaccatcataatactaaattgtgcttaaaaacattttttagccaggtatgggagtacacacctttaacccagcacctgggaggcagaggtaggcagatgtctgtgagtttgaggcctgttagaaagttctagggtagccagggctatgtagtgaaacctgtctcaaaaaacaaaacaaaacaaaacaaaacaaaacaaacctactttttaaaaattacatttaaaaacttacacccaccatagcacatgtgtgggtatcagagggtagcttatgggaggggtctgttctctcctccccctgggtgagtcctaatttgaagtcaagtagtcaggcttgatggcaggagcctttaccccatgagccatgccagtttcaaagtccgcatgttaaaacacataagtatacaactatggttctataaagcagagcacagtgtgtgttttcactgctattcccccacccttaaggtgtatgttttgggaaacaagaatattaatacagggattgggctctaggcagtgacttatccaaggaggccacaggttaaaaccaagtaggacatgctgactgcaggcttgggaagggaagaggctagcactgccctgcccggggtgcactggccttgctgggggtgggggggcactctggggtcatgggaccatttatacctaccaagcccccaaacgggtgctggggcatgccccatggagaacaggaagaagcaggagagggacagtggctttgcactcggggtgcagaggcaggcagatctccgagttcgaggccagcctggtctacggagtgagttccaggacagccaggggaccgtgcctttaaaaaaaaaatagttctaggctctatagcaagactccatctcaaaaaacaaagagcagatgttaacccctgtccttgtagggtttgggggcctctggtctcttgggtggtgaggagcagtgtgccagcacttgtctgtgcaccttgtctcacagagcatggtgtgaaagtctcatgtctctcttctctcttacagattgtgatttcacaggtaaaaggcagacccctcctgacagtaataggaacccccaaagcttgtttctgctgcttcagcaagcctggagctgagcaggaactttgttacccagtggccctggggaaggccacgggtcatttgagaatccagtgaccaggcttggagcaaacttgatgagtttttcttgcatctgggcttgttgtttgagccctgggtgtgccagacaagtgctctgccactgagctgcagccagtccccatgccatgtgcttgtttttgtaacctgagtctgtttactcttttgtgatatggggaagggaggggctgttctgcatttattagagtctgtctcctgggcctttgcttcccagctccccatccagtacaaccaggccttccgagccctggggaggagaccattgtctaactctgagcctgaccctacattgttgggcactgttctttcttgctgtagggtattttagatcatcacaaatctgtgtagacctgtctcagatttgagctgcgcacatgagcatctccccacatacactcactctcgtgtctgttcagtgctccccgaatcccttgtctgaaacactgctgccttgctccattgttgctaacataccactgtaaccggtaaacctctctgtgcccaccccagctctgaataatgatacggagacttattatatttataagctttgggcactgtagctgggcagattctcagctagtctaacctaagaacatcaactagcctccttcccaccacgcggcacatcaccatctcagcctcatcctggaacctgcttcttcatccatgtccactggccaccctcacatctggttcctacctgaaaccctcgctttcagcccagaagccttaactctccagcccagccattagccagaaattcggctgtttatttgaccaatcagaaggtgatggaaaacaatgtttataaaataccagggcaggatatgcttcacagtaatgacaatactagggttggccctacagtcagatctctgccagcacagaagtcagcattggaatatataaggataatttttacacaatgtacaaaaacagtgctccaacatatcaccttatggaagacacgccattttagataataccaggaaatgacagtacccagttggatccagaccagtgtcccagcacggatcagtttgcactctaggattcatcttggcactccctggtacccatggaaacagcagagcacctcagcagggtgggattggttcctctgtgtgaccttgcttgcagtcttcctgccagcagatggcaagacttcttcggggcagggctggagggggtcttgagctctcagtgtcttcttagttcttggctctagccgagctgcctgcctttggtgaacgcgctggttgttgtgagcattgtttcccttcgttcacaggccttttcctagacagatgcatgcaaaacacagaggttaatgcagaccacttacaattgctgtttgctaggccaaaaatggatgtggcaactgagtgttaagcagccacatgtctccatgtgatttctggtgatttggactacctcacaaaaagaatggtttgcaaagatcaagacagcaacttctaacccaggaatgccagagctggcctactgtcctccggccagccccatctgctgggactggcttctccagcagcacctcttctgcgtgcctggctggccgagcgctgcggggagtcctgttggccaactcttgcctcatggatctttggctgctgtggctcttggcttccttttatctctgccctcttcacagagcatcagtagcttgtcagcctgagcttcccacttgctctgaagcattcagggtagcaccaggtgctcctcccaaagactgtgtgacttcatagtctcaagagccttaaacaaatcttctccgtcctttgatcgtctcagtgtcctgattcccacccccatccccaggccagggtacctgagcaggtggacaatctgtcttcatgccactgccttctccacagactgagcctgcgctagttaggacctgtcatttctgccagcctggggtctcatcaagtgctgaaagggggttggtcctcagcttgccctttgtgcgcagtggagctatggctgccagggagaaattctcaggatctgtgtgtgtttcatttcctacagggaagagtggatgcgggctatccagatggtcgccaacagtctgaagcagcggggcccaggtgaggacgccatggattacaagtgtggctcccccagtgactcttccacatctgagatgatggaggtagctgtcaacaaggcacgggccaaagtggtaagtactggtggcaaggagccaggggctggggctgcagcagcccttcctgcctgggtttccacacaaagtacacaggggttcagtagggggccttcatggcttctcgatgtaggatgacctctggctatggatgctgtggggtgagtgatggtgccagggcaaactgcctatctgctgcttcagcacacagttgccatgtgtccccgaccacctagaagcccttgagctatcgcttcttttggatttcctcttccttgttgcaattttgtcccatgggtcaagtgcattctccctccccgcagaccatgaatgacttcgattatctcaaactcctcggcaagggcaccttcggcaaggtcattctggttcgagagaaggccactggccgctattatgccatgaagatcctgcgcaaggaggtcatcattgcaaaggtgggcactcggggtggggcccgggaggctgcttcaggagtgtccagataaccgtgcagtaactaggttagccccgattgtctgtggttgtagtttgtgaagcagggcagcctcagttctgtaaacagagtttaggaggcaacagcaagaaagcaacacagaggcaaagctgattaacagtgggttatctcaggctacctttcactgggactaaaagcagaggagactttattatcacgaggtctcctgtttcaggaaaaatcaatctgtttgcccatctcctgctgagtctgaaacagtggtctgtaatggatgaaaaaggggctccttggtaggtatagcacctgattgataatacaaaaggcacacagtccagtcatagcactgggccttgagatgacaacaaccaccgattaccggtggtgcacacatttaatcccagcacttgggaggcagaggcaggcgaatctctgagtttgaagtcagcctggtctatggaaagagttccaggacagccagggctgcacagaaagaccctgtctcgaaaaaacaggaaaaaaaaatagatgacaatagccatctcttttttttttttttttggtaaggagtgaggatggattctgggaatggagccagggccttatatttacccctgtaagctctgtgccactgagccgtatctgagtgtcctcaggagccgcagtctggtgctatacctaccatgcttgggagctctttcaggcctgggacatttgctccgccatctgatattctgccccctcccccaccctacccccccactccacccccgtacatcctgtcccaagtaccagtctcatgggatgactgtgttaggagaaaggcctgagcccctcgaaccctgggcctcactcagcaggtgctgtttaggagctgagttgggaaatgtgatctatcaggatcccagccaaagcagttcttgttggtgttattttgtttgtttgtttttgtttttgttttttcgagtcagggtttctctgtatagccctggatgtcctggaactcactttgtagaccaggctggcctcgaactcagaaatccacctgcctctgcctcccaagtgctgggattaaaggcaggcaccaccaccgcccagctcttgttgattttttttttttttttttttaaagatttatttatttattatatgtaagtacactgcagctgtcctcagacactccagaagaggacatcagatcttgttacagatggtcgtgagccaccatgtggttgctgggatttgaactctggaccttcggaagagcagtcgggtgctcttacccactgagccatctcaccagcccgatttttttttttaaagatttatttatttattatatgtaagtacgctgtagctgtcttcagacactccagaagagggagtcagatctcgttatggatggttgtgagccaccatgtggttgctgggatttgaactccggacctttggaagagcagtcaggtgctcttacccactgagccatctcaccagcccctcttgttgatttttaacacacaactttttctcttttggtctgttgagacagggtttctctgtgtagtcctggctgtcctggagctcactctgtagaccaggctggcctcgaactcagaaatcagagatctgcttgcctcttcctcttgaaggctgggattaaaggagtgcccagcagaaggaaaggtttataataagcttaatagtaaaattcttacacaaagtacagtgctcaagataaaggggactcaggggtggcctgtggagagcagagtgtcaggtgccctggagttgaagttgcaggccattataagtggcctattgaggatgcttgggaattgaacttggttcttctgcgagaggaaacaaagctacttacagattattgataaaactgatccagagcagggcttgtcagctttagcactatattgtgggccacgtgattccttagtgtggggctaggaagtttagctgcgtccccagctgcgcatgcagagggcactcacagcctccatttgtgagactcagaaatgatctgatagtcccagtgtctcctgagtttaagctcttgcccagattgttgaggtaacaaaaggcatctagaagctctgctgtggtcctaccctagagcatacactaactccagcttttgggacagtgccccacccctccccccagtgcctctccatatgctcaccctgagtttctgacagaatgggcccagagcatatgtatttctaccccgatgccagcgtgagccctagaaggactgctaagatgtggagccttctctgaagttggggttcctatgttgatatggtacctgtgggtgaggggtcacatactgtctgcttattccccctctaggggtcatgttagagctgcttcgtggtgacagattgcgtagagtttgcaacaggaacggttttggctgttttatatgtttcagttcatggatgcagtcttgtgtggctttaggcctgtggggaccttcattgcatgtacattacagagcacatggcagggagagctaggaagtaaagggagaagaggctctgggttcccagtgtctcttttaagggcacaggcacagtgactagtttcctcccattagactatgtctccaaagtctcccaattcccaagagtgctgtaggtggggaccaataccacatcttcagcacttgggcctttaggtcattgaagattcaagtggtagtggaatgttggtggctgacctgggttcaagtggtgctagcctcgactctcagttgtggagtcatcagccgttcaccttgtgctttcgaagtcacccttgtctaggctgccatttgggcctgaaaagggccctgttcctattccccagtttggggaggtttcatctggattttgttccttggtgaccgcaggttctcatgtgtccctgccactcatctatactgtctgtccacaggatgaagtcgcccacacagtcacagagagccgggttctgcagaataccaggcaccccttccttacagtgagtttcctctccttgccaacccttgagaaggagatgttataggcacggctttagtgtaggccaggcagggcatcactgggctcccagactgcttgaacactgggacacttcatggtggttacttggtggccatctttgggagtgagaggtgcttagcccagctggccaaagtgagaagactgcattttgtaagaaacctcagtcacaaacatgccatcacggtgtagcctttgactccagctgagtagatatggacggtagctttgaggctgtgtctctgtgaagtcctgggttcagtgctatgttatgtgatccctcaatgtagaaggcagaaccggagagcttgtgtattttgtgagcagaggagttgtcagggcttggggaggaaccctgtaggactccatagaacacaagttgagagctgctgtagactgacagcctggctgtcttgccttgggagttagcacccaatgcattgtcactctgagccatagcagacgaggtttgtgtgatacagtgcacagctctggtgtgatgtcttttacagaggagagctggggagacagctctgggtggtcagaacctatctcttcccctggacatgcctaggacttgaacccctctgacccaagcaggcccgggtgtggtgtgccagttcaggtccctgccttccagctggcagagagagctttcattctggttcccttcacaggccctcaagtatgccttccagacccatgaccgcctatgctttgtgatggagtatgccaacgggggtgaggtgagctatggcacctggccaacttttagtggtggtgagggaggtgaaaaagacctaggtgagaaggggatatgcttgtgcgtatgtggggggaggggcagagggagaagggaggtttattgaatgtcatcaagtgctcccctgccagccctgaagcagatgggggacagactggggcaggctaagtgagtgactcacccaggttcgcactgctgctatgttgccgggcagtattcaaagccaggtacagaggctgctgtgtagtagactatcaggcccgggaatgtgtgcctggggatccctgagaaagcacgtgggcctaggccccagcccagtcccatgcctctgtcactgcatcagtgacacccactaccacaccccactgccctctcgttggcacctgccactcactgcttttgctccagccctgcttgctcacttattaatagctaattggttaatgtgcttatttgtttaattttaggcaaatctcattcagatagcccattctcattccatagctaagattggccttgaatccatgattctcttgtttctacctcccatgttctgggattacacactatacacaccagcctcatccttagctcttttttttttttttttaagatttacttattgtatttatatgagaacactgtagctgtcttcagatcttttgttttgttttgttttgttttctgagacagggtttttctgtgtagtcctggctgtcctggaattcactttgtagaccaggctggcctcgaactcataaattcacctgcctcccgagtgttgggattaaaggtgtgcgccaccacgcccgccccccccccctttttttttaagatttatttattttgtgtatgagtacactgtagatattttcagacagaccagaagagggcatcacatcccattacatatggttgtgagccaccatgtggttgctgggaattgaactcaggacctttggtagaacagtcagtgctcttaactgctgagccatctctccagccccagctctttttaaaaaaaaaaaaaaaaaagtcttgtgtacctgaggctagtctcaaactcaccctgtagccaaggctggccttgaatgaaactcttgctgtttcagcctcattgctgaggttgtggtagtcccattatgctggattgcaccttttctctcttgtttgctcttgtgcctatgctggagcctgtctgctctggggcatatcatgcatggcctgcggggccaggtctctgggaaccagtgctaagacctggccttctcttgcagctgtttttccacctctctcgggagcgagtcttcacggaggatcgggcgcgcttttatggagcagagattgtgtcagctctggagtatttgcactcgagagatgtggtgtaccgtgacatcaaggtgagaggatggtctggaggtcgagggtcggatggggtggagtgcacaggatctgggatatctcatggcacacacctcagatagttctacagtgaagacctgtgagtaccccaggctacagctggggtgtcagttggaaccatccagagcataacttggcagtgacaccaaaactatgtgccagccatcggcccttgtgcacaccagacatggggccatgtgttcagccgggaaggtgtgcacatgctcagagcagcactgttcatgctgccaaacagtgtgcaccatgggcgtgccattgtccaggggaactctgggtagcagaacaagatacacagtggctgtggctgcatcccattaagggaaagggaccagagccgatgatgaactttcataggtggatgtggaatgaagcttggtgaagcttgggggtagagtgcatgaggccctgcttctcggcccagcacaacacacagacccgagagaaccaagtcaaggaagagttgttgataactgggctcccagggttctaccagaaactgggctgtagacaccaaggccttattgaggtatcatgtatgtacctgggctgtagacaccaaggccttattgaggtatcatgtatgtacctgggctgtagacaccaaggccttattgaggtatcatgtatgtacctgggctgtagacaccaaggccttactgaggtatcatgtatgtacctgggctgtagacaccaaggccttactgaggtatcatgtatgtacctgggctgtagacaccaaggccttactgaggtatcatgtatgtacctgggctgtagacaccaaggccttattgaggtatcatgtatgtacctgggctgtagacaccaaggccttattgaggtatcatatatgtacctgggctatagacaccaaggccttactgaggtatcatgtctgttgtgagctttatactatctcctagtatgtgtttcataactaaaagaatatctgagccatgcattggcagtggtagcccatgcctttaatcccagcacttgggaggcagaggcaggcgaatttctgagtttgaggccagcctggtctacaaagtaagttccaggacagccagggctatatacaaagaaaccctgccttgaaaaaccaaaaaaaaaaaagaaagaaaaagaaaaagaaaagaaacagaaatccacaaatccacagggcatgtgttatggccccttataccccagaaatccctgatgtgacagcttgtcaccccaaactactgcctctacagcagtggttctcagtcttcctaatgctgtgaccctttaatgcagttcctcatgttgtagtgagtcctaatcacaaaattattttcattgctacttcataactgtaatgttgccgccattatgaatcataatgtaaatatgtgttctctgatgctcctaagtgaccctgatcgaagagtcatttgaccccaaaggggccaagacccacaggttgagaagctctgctttagtgggaaagaaactctgggatggtctgtccctcatatattggcttttgttgttgttgttgtttttaaacagctggaaaaccttatgttggacaaagatggccacatcaagatcactgactttggcttgtgcaaagagggcatcagtgatggagccaccatgaaaaccttctgtggtaccccggagtacttggcgcctgaggtgtcttgggctggaggcagggagcgtgcaggctagggtggaggaagccagggggtggagcccctctagcctggcttcttctccttcctccctcaggtgctagaggacaatgactatgggcgagcagtggactggtgggggctgggtgtggtcatgtatgagatgatgtgtggccgcctgccattctacaaccaggaccacgagcgcctctttgagctcattcttatggaggagatccgcttcccgcgcacactcgggccagaggccaagtccctgctggctggactgctgaagaaggacccaaagcagaggtgtggcctgggagtgcgttgtccccttagcaaccccagtggccccacaggatacacctccctgcactgcctcttctgaggggacacaggaatacagcattcctatggccagcctaaggtcacaggactgtataaggttgagccagtgtgtgagctgtctgccttgtaggcctacccactaccctgtcacctgttcatggataaagatgaggccagttatgagaccaccttgtcctaaattgcctcctccctgcctctgtcctaagccatgagctccccaatcctaggtctcctcagaaaaggggtttgtggtaggagagactagcaaactcggtgcagtgcaggggccttgaccgtgggttgtatgtgcctttgctttgagcctggcttgtagaacctgcagtttcgggtgctgggtggttgatgatggttgtctctgcccaggctcggcggaggtcccagtgatgcgaaggaggtcatggagcatagattcttcctcagcatcaactggcaggacgtggtacagaaaaaggtgagtccccttgcctgcctcaggggccctcacctgcccactggggacctgccattgctgactctgggctcctctccacagctcctgccacccttcaaacctcaggtcacttcagaagtggacacaaggtactttgatgacgagttcaccgcccagtccatcacaatcacacccccagaccgatgtaagtacctgggaccccatggtccctgggtctgactagatggccgaaaggtagctacggtctggcctggcttctgcttgccaggaggaccttggttggctgtctttactgtgtctgacaactttcctctaagatacgcttgcaaagcctgctgttgctgtaaggatcgtcaaggactatggctaaagtatgttctggggtttagggacaccctggtctttggactgtgttcttgatctgaagctactccaaggccggccactcagggggtccccctgtcctgggctgcccagagcccacagctttcctgggatcccagggctagggaagcctgagaagctacctggcctggctgtgtggcagccaaaagtgcattctgggcaggagtggcttctgggtaccagcaatgagggcatcttgcaggaaaaggataggcagtggacaggcagatggggcagggggttaaagtagaaagttctaggggtcacctgggaaatggaggagacctcagccatgggaacttctgtaagtaagtgttctgtgtgttagggacagaattacgccagggctattgacagtcccttggtgcaagtgagtatgggtgggaataggccaggctagaccctggtggtagagggtgctggggagggggaaagacattcagaagacccagccagggaaggaagccacagctaaggcctctccagaagcaagctgcttgcctctggcgctagtgctgtgggccaccactctagtgcaggctttcctggagtcccagcatattcctttctgggtgctttcccagtgaggtggggtgggcaagactgctgctccttcatcttcatgaatctccacccaatcctacagatgacagcctggacccgctggaactggaccagcggacgcacttcccccagttctcctactcagccagcatccgagagtgagcagccctctgccaccacaggacacaagcatggccgtcatccactgcctgggtggctttttaaaaaaaaaactttattttgccttttggtttgtgttcccttccctgtcccctcatcccaaatccagtttcttcttcagtccttgctcagacttagtggtcctggcggccctctcctctgggctcccctctgttccaggtgagcgctggggaccgcccagggacaggctgttgggaggatggagagtgaggtcattcctcaccactagcctccaagagggtgaagtggggagccatggggtcacatggatttggaggcacgccagcggaggacacatctagaagttcccctcactcccagcacctcagctgccttccatgctgtcctctgggcaatcttatctgctgccaccccacctggggcacaaaagcagtaatgtccagggacaggcagaagcctttggaagctgaggggtctgggtttgcttctatggagaatggatcttcaagggggatccaggagcaggagctgccttcctcttcctcccaagctactctcttgattctcaataaagcaggaggaatgttcgggggcagccctcctgcccacagcccagtgccttaccagggcttccttctagccagccttgcctcccgctcggcccctttggatgnnnnnnnnnnnnnnnnnnnnnnnnnnnnnnnnnnnnnnnnnnnnnnattgggccccttggacttgactggggtctgaggggacagagaatggggataggtgtctgatacacaatggggtggagtctgcctcatctcccagggcacctgttctggagccttaaagtgaatgtttgagttagagttgtgtcagtgctgtgggtgcgggtgtgcacctgacctagcagtgagcatcccaggctcctgggatgctggtgcccacagctgtatgcagcacttgtgtgagtgggctcaggctcagccccagcctgagtgtttgatcccacggggtgcagtgagtgcaggcgatgtgcctgctgctctggccatgtctctccctcctcaatagctctgggtttttggaaatgagttctcctggttttgctctcccaccacacccccagaataggtggatttcagaaaggcagtagggtggggtggttgggatggttatgggggtcatctgttttttactttgtatgtgtgtatgtttatctgagagttttcgcccatccctgctggcctttccttactcctcgtatttgtacggtacaagcaataaagacactcatttcagaccagggcccagtccacatttccttagccaccccttctgtcctggtactggagtgccagagtagcatgcaccatttattacctgctctgccttattctgaggtccatggagccatggggatggaagagatggccgtgagaaagtgggtggtggatcccggctgcagagagcggcgctgcagaggaaaaggtggctgggtggtttctgttgggtagggatggctcggacccttagaagctgccagattgggggcagcagtgctgagcggctctaaacaggaagcacgagcgctgtggcagcagaggggtggttcattcacttggcctctgagccctaaacagcttctgtgtggaaccaggaagccttagtgtccccaaatgccatcataaaatctgtgacttaacagggcttgtgactcccagcaggaacacccggacatttgattacagctgcactggtctaggactgaaccccatgctgaacctgtgggttgtggggctcactggggtacttgctcctttcccatacccaggtgccaggcacacagggcctggtgcagatggatttgttccaggatttactagaagacggggcaccacaagcatggcgatctgagaactggaaagcgggctgtgggaaagcaaggccagtttagacacctgtcccaactgcagagaagactgcgtgcggcccaggttgggtgtcccgtagctctgataggagaaggtggagccttgctggggtgttagagttcactgtagtctttcactctagcctaggaaaaagaaaaatgctttgcattcccctgtcacagcacctcagtcaccttgtgtgactcatctcccagcaggacacgttcctgcctacctctggttttcagcagctccgcgaaaggagctcacagtcagctgttcctgtagtgaacacacgtgtctacgctgcttagtgtgagggacaaagttttcataaaagttttcactggaatcctttacaaggctcacttcaaacatttcacaaggttttgtttctccccaatctgtgtgtttataagagcatcagggagaagtgagcccccacaacccaggctgcagtggcatcactgtgcactttgccatgaacccttggcctgccttttgtgcatccctcattcttgccagctgcagccgtgcctgggctatgcccctttgccaccataccttaggaattttgcagatgtcctcagtctgctgggtccttgaggaaatgagacttgggtatcaggggactctgtggccttgtggtcccagttgcttcacaaggctgcatgggcgtgtaccttccatcactaagatctgctatcatcagtgctgtaatcaaaaataaaaataaggctccatcttgctgtgcttgtactttggtgtttatggcctgcatcctgtgatctttgaatggactggctggttttgaaatggtttcagatctaaagtggtactggtcaggaatggtggccatgcctgtagtcccagtatggggtgcggtgggaggtaaagaagagggattacagggttaagcctagggtatataatgagaccgcctcagacttcagagatggggatggagtaaaggaaacagcagataattccaggacctgcggtaggaggaataggatgagccagtagcatctcttggacctacttagttcagggacccagttggcaaagtgcgtgccatgcaagaatgtagtcccagctggtcgtggtggcacatacctttaatcccagcatttgggaggcagaggcaggtggatttctgagttcgaggtcagcctggtctacagagtgagttccaggacagccagggctatacagagaaaccctgtctcaaaaaaaaaaaacaaaaaacaaaaaaacaaaaacaacaacaaaaaaaaaacacaaaacaaaacaaaaccaaaaaatgtagtccccaagtgtggcttgatggctaagaactcttacaggatagcagaattgtgtttccagaactatgctgggcagctcataaccacttgtttctctgatgccctctggttttcatggacaatacactggaatagacatagaaataaatttattttatttttttggtttttcgtgacagggtttctctgtgtagccctggctgtcctggaactcactctgtagaccaggctggcctcgaactcagaaattcacctgcctctgcctctcgagtgctgggattaaaggcgtgcgccaccatgcccggcaaaaatttttaaatgggggtgcagtagtgacctgtgcttgtaatctcaacactagagagatggagaccagagcatctttgggccttgctggccagacatttcagctaaacaagttccaggttcagcgagagatctgtgtcacaaagtgggaggctggagagatgggtcaggaggtaagagcactacctgctcttccagaagactaggtcccatgtcgagctcccacatggcagctcacaaccatctgtcattccagttgcagaggatctggtgctgttttctggctgccacggtgcccagcatgcacagtacacaggcaatacacattaaataattttaataaggtgagaggtgattgaagattccaaccctccagtcttcagaggtttgtgcacacaaacagtagggctgaggcagtacatcagtgacagcatgtgtgaatgtacaaagctgtgcatttgatacccagcaccaacaatagcccataggaataagtagatcccaagccaggcggagatggggcatggttttaggagacagaggcaggcagatctgcgtttgaggccaacctgatctacagttagttccaggacagccaagactacatagggaaaccccgtctctaaaagaacacacacacaaacacaactcagtagtgaagggagcctaaggacaccagagccaagaggggacacctagcaagcaagccccagacaacacaacactataatattcaacgctctctgacgagtcatgggaaggtccgatagatctgcctccacgtaataagcctttcctgggacggaggctgtacattctcagaaaagacagttaatatggtttggattcgatgtgtgtcccagaatgctaactagtatgtgtgtatggcttggtccccggctgctggtgcttttcaagaggtaactgggtcatggtgtgccaatctcatgggttaagccacaagcatgcagctgaatgggctgttagggtctggaactggttggagggagcaggtctgtcagctgttatggctcccttctgctacctgcctgcctgttgtgaagcaatcagccttatttttttcatgctctcttgctactgtgtcctttttgctgtggacccacagtgacaggggctatacagccatagagtgagacctctgatggtaccagctgaaataaatgctcctaagttgtctttgttaagtatcttgtaatggtagtgggaaatttgagactattttgcaatgtagcacagactggcctggaactcgagatccacctgcctctgcctacagtatgctgggattacaggtatgtactgctgtggtcaggctacagcagtggatttgtttacttttgaaataggtctcatgtagcccagactggcctcagaatcactgaaatgacctaggactcctgatcttcctgtctctgcctcccaggtgctgggatttccagagggccccaccatgtctggctgcaatataaactcgatgaacgtttctgacagtgtcagtgttaaccgtcagtcttgtctgtcagcagagtgtgttgctgtgctcattaaaatggtgctttatttcttccatcttcctttcccaaatacgtaaccaaggctaagtgaaggaaaccaagatcaggcagatgtctgaccagtactgaagactgacagggaaaggagaacatccaagagaaacccccatcacaatgggcccttggatggagtccagggtgagaaagatgatgctcggtgtattaggggtctctagacgaatagaactaacggtgtgtgtgctcacgtgtgtgcatgtgcacacgtgtatggggggggggagggagagagagagagaaatttattaggatggcttacaggctgtggtccagctagttcaacaatgtctaccaacagaagggccaagaatccagtagttattcagtccacaggagtggatgtctcagctggtctggaatcctaaagaagttggctctaatgtcagtaaaggaatggacttgctagccaaagcgagagcaatctggcaaaaaaaataaacgcttccttcttgcatgtcatttatataggctgctagcaggaggtatggcctagattaaaggtggagcttcccaccttgaaagatccagattaaatttggtgtcagtggtacacacacctttaatgccaacacacaggcaggcagatatctggccaggcttgtttacagagcaagtttcaggacagccagaacaacacagagaccctgtattagaaatccagaggaggaggaggaggaggaggaggaggaggaggaggaggagaaagaagggaggaggagaaagaagggaggaggagagaagaggaggaggagataactcacaggtgtacccagccactagagtttcacttaattctagatgtggtcaggttgacaagcaagaatatagacatcacatgggaggaaggtgagtgaagcagtttagctactaacagatctatgcttgttgcaatatgttaataatggggaagatgggggattggatatcatatagctttctgtaactcctgaagtaaaaactgcatatatgctgggatgtagtcccctggtagaagacttgttcagagtggacagggctctggtttcaatctccaaggttgcagaaggatacaaaacaccctgttctttgttcttccacacttggccacattcagtttttctccagctcttccatgtttcagtatttgtctatagacaagaatgtccttttactcaaggacttaccaccaaggtaggaaagaaagttactgttgacacactgttccctttccacaaacctttatcaaattttagtcaagtgcaatgttcctgccttttaaaaatatcccaggggtggagagatggcttggcagttaagagtgtttactgtgcttgctaaggacccaggtttagtttccagtacccacactgggtagctcacatcagctccctctagagggaatctgatgccctcttctgtcctctgctggtacttctcatatgagtcacataaacacaggaaggcacatttacacaaacacatgctgacacacatataaatcttacaaaatattgggggggggggtcaagttcactgactgcttttcctaagtagcaggtagctcaaaaccgtctataattccagttgcaggagcttgaatgcctacctctgacttccttttttttttttttaaagatttatttattatatataagtatactgtagctgtcttcagacattccagaagagggcaccagatctcgttacagatggttgtgagccaccatgtggttgctgggaattgaactcaggacctttggaatagcagttagtgttcttaaccactgagccatctctccagcttccctacctctgacttccacagacaccaggaacacacatgctacacaatacatacctgcatgcatccatgctcataaaaaaaagtcatttaagaccaggcagtgagtcaggcgtggtggcgcatgcctttaatcccagcactcaggaggcagaggcaggcagatttctgagttcgaggccagcctggtctacaaaaaaaaaaaaaaaaaaaaaaacaacaggcagtataagcacacacctttaatcccagaacccaaaagacagaggcaggtggatgtctgagttcaacgccagcctggtttatagagtgagttccatgacagccagggttacacagggaaaccctgccttttaaaatctaaaaataaagccgggcgtggtggctcatgcctttaatcccagcacttgggaggcagaggcaggcagaggcaggcagatttctgagttcgaggccagcctggtctacagagtgagtgccagggcagcccgggctacacagagaaaccctgtctcaaaaaaaaaaaaaaaaaaaacaaaaaataaataaataaaaataaaatctaaaaataaacaatgaaaaaatcttttacaaagttttgatctggggctgtactgtaaggtactttgccatcatgctgggggacctaggtgtgatgatagcccaacacagacaacgcagagtaccgcttagggcttggtatagacccggttactagtctgcatgaatgctcagttattctgcagactatcttgtctggagtgtggctcagcaatagtctgctcacagtgtgaagtgccgtggactccacccccagcacccccctcccctaagagagtgtctggatcagggtttgctgtttgatggagtggtgtttcttcatggttaaattcactctggttttgagtctttaaaaaatagagttctggggctgttgagatgggtaagagcactgattgctctttcgaaggtcctgagttcaaatcccagcaaccacatggtggctcacaaccacctgtaatgagatctgacgccctctactggtgcatctaaagacagctacagtgtacttatgtataataataaataaatctttgggccagagtgagcagggagtgagcaagagaagttgactggagtgagcagaggacctaaaccatctgtacagctacagtgtactcatatacactaaataaattaagtaagttctttcccagcacttgggaggcagaggcaggcaaatctccgagttcgagaccagcctggtctacagagtgagttccaggacagccagggctacacagagaaaccatgtcttgggagagagagagagagagagagagagagagagagagagagagagagagagagagagtgtctttagtacttatctgtttggttttgttttcttttgtaatggggtccctggctgacttggaatgcactctgtagaccaggctggccttgaactcacagagatctgcctgtgtcaccctctagagtgctgggattaaaggtatgcgccaccaggcctgtccagttatttatttgtatgttatgtgtgggtgtttgacctgtgtgtagtgcatccatatacataaccatggaagccagaagagggcgtcagctcccatggaacttgggatagtttcccctttgcattcctggctctctctcttgagtgttctgggactactgcgtttaaatcaagtccaacctgtgcatccattcattcaagaaatccttgtgggccaggtgtggtggcgcacgactttaatcccagcactcgggaggcagaggcaggcggatttctgagtttgaggccagcctggtctacagagtgagttccaggacagccagggctacacagagaaaccctgtctcaaaaaaaaaaaatccttgtgaaggaactactatgtgccaggtagtattcttgaccctggaaatacagcaagagtgtgtgttggagatgggggtgggataacaaaaagtcctacccgaggggctcacactcctgttagaaggcagtgagtgcccagaagccagacattggtgcgtgtttctaattccagcactcagaagtaaagagaaatgtcaagttctagccagcccaatctacatagagagccactggttttgtttgttttgtgtgtgtatgtggtttgtttgtttgtttgtttgtttgtttgtttgtttttgagaccaggcctctctgctgtcctggaatttactatgtaaaccaagctggccttaaattggagatccacctgtatggcccaatcactgggatgaaaggtatgcaccacacctagtcagctgttgtctttctaaaaagcacttaggagagaataagtgcaaagaattagcaagagaccatggtttccatggagataagcagtaagggttcatgagtcccggaagaaagacaccttggactcaaatagtacataaaagcaaagagtgttttattctgcagaggtccagcaggctggggtctcccattacaagacccgagagacacccaagtgatttgcaggcctgatttaaagcacaatagtgaattctgggtaagtgacctctctgttaatctgttgggtccactgttagaacatccattatcagggtatgggagctggaaacttgcgggagagatctggaaactgttgctgaggaagtagctgaggatagctggaaatagctgctgacccattgtccttgcctcaggccaggtggcaggcggcttctgaggaccggacttgcccagttcttggaaacagagatttaggccttgtctacttaactgccggtttgaagcctgtcatggagtcagtctagccttctcaagggagccagtatcttttttcaaaacagatttgttttatttatgtgtataggtgaaggttgtcttcaagagagtagcaggtcccccagacctagattaactggtgctgggaatcaaactcaggtttcctggaagagcatcaaggctcttagtggttgagccagtgcccacgcccctagagtcaatatcttagaagaggtctgggagcatctttagtctgtaaagcaaactcaaacaatccctctggagtatagtgaactgctttgcactcagtgtcttgcgagaacttccatc

SEQ ID NO: 412 - DNA, 1722 bp, Mus musculus
aggcgtcgccgccgccagcactgccgccgttgctgccgccagttcataaataaggagcgggaacgagctcagcgtggcgatgggcgggggtagagcccggccggagaggctgggcggccgccggtgacagacgatactgtatccgaggagcctcctgcatgtcctgctgccctgagctcactcaagctaggtgacagcgtgtgaatgctgccaccatgaatgaggtatctgtcatcaaagaaggctggctccacaaacgtggtgaatacatcaagacctggaggccacggtacttccttctgaagagtgatggatctttcattgggtataaggagaggcccgaggcccctgaccagaccttaccccccctgaacaatttctctgtagcagaatgccagctgatgaagactgagaggccacgacccaacacctttgtcatacgctgcctgcagtggaccacagtcatcgagaggaccttccatgtagactctccagatgagagggaagagtggatgcgggctatccagatggtcgccaacagtctgaagcagcggggcccaggtgaggacgccatggattacaagtgtggctcccccagtgactcttccacatctgagatgatggaggtagctgtcaacaaggcacgggccaaagtgaccatgaatgacttcgattatctcaaactcctcggcaagggcaccttcggcaaggtcattctggttcgagagaaggccactggccgctattatgccatgaagatcctgcgcaaggaggtcatcattgcaaaggatgaagtcgcccacacagtcacagagagccgggttctgcagaataccaggcaccccttccttacagccctcaagtatgccttccagacccatgaccgcctatgctttgtgatggagtatgccaacgggggtgagctgtttttccacctctctcgggagcgagtcttcacggaggatcgggcgcgcttttatggagcagagattgtgtcagctctggagtatttgcactcgagagatgtggtgtaccgtgacatcaagctggaaaaccttatgttggacaaagatggccacatcaagatcactgactttggcttgtgcaaagagggcatcagtgatggagccaccatgaaaaccttctgtggtaccccggagtacttggcgcctgaggtgctagaggacaatgactatgggcgagcagtggactggtgggggctgggtgtggtcatgtatgagatgatgtgtggccgcctgccattctacaaccaggaccacgagcgcctctttgagctcattcttatggaggagatccgcttcccgcgcacactcgggccagaggccaagtccctgctggctggactgctgaagaaggacccaaagcagaggctcggcggaggtcccagtgatgcgaaggaggtcatggagcatagattcttcctcagcatcaactggcaggacgtggtacagaaaaagctcctgccacccttcaaacctcaggtcacttcagaagtggacacaaggtactttgatgacgagttcaccgcccagtccatcacaatcacacccccagaccgatatgacagcctggacccgctggaactggaccagcggacgcacttcccccagttctcctactcagccagcatccgagagtgagcagccctctgccaccacaggacacaagcatggccgtcatccactgcctgggtggcttttt

SEQ ID NO: 413 - protein, 488 aa, Mus musculus
QRVNAATMNEVSVIKEGWLHKRGEYIKTWRPRYFLLKSDGSFIGYKERPEAPDQTLPPLNNFSVAECQLMKTERPRPNTFVIRCLQWTTVIERTFHVDSPDEREEWMRAIQMVANSLKQRGPGEDAMDYKCGSPSDSSTSEMMEVAVNKARAKVTMNDFDYLKLLGKGTFGKVILVREKATGRYYAMKILRKEVIIAKDEVAHTVTESRVLQNTRHPFLTALKYAFQTHDRLCFVMEYANGGELFFHLSRERVFTEDRARFYGAEIVSALEYLHSRDVVYRDIKLENLMLDKDGHIKITDFGLCKEGISDGATMKTFCGTPEYLAPEVLEDNDYGRAVDWWGLGVVMYEMMCGRLPFYNQDHERLFELILMEEIRFPRTLGPEAKSLLAGLLKKDPKQRLGGGPSDAKEVMEHRFFLSINWQDVVQKKLLPPFKPQVTSEVDTRYFDDEFTAQSITITPPDRYDSLDPLELDQRTHFPQFSYSASIRE

SEQ ID NO: 414 - DNA, 54732 bp, Homo sapiens
tcaggggcggtaaggaagggctggccggggtgtgggaggaggcgacacaagatgggaggtggccctgtctcttgggagcaaaggcagaaggaggtggaggcagctcagggctcggaggagaggggtccgggctccttggctgtgtccctgctgtctctcgctgtgggtattcaccgaatctctcccatcctcggttttcacatctgctgcatgcaggtcctcatggttctcaagtgaggcaggtggtgagcccatcaggccagtgcccagggcttattctggggacagctcctggagaggaagggctgcctccctaaggactcctgccctgccctgggtgcaaggggttccacctgctgcccctcccccactccccagctcgcctcaggcggatagttcccctctcactccaaataagagccacaatgctgacagtggcccccaaggccctgcccagcggtccccagcttcctctagctacatctcccggccctccccttcacccactcctgtaggcgcctcgaacgcgcctcagccctgctcctcccctgcctgcagcgttcctccccaggtctcccccggctctctcacctgcttccggttttgctcagactgcgctgcctcagtgcgcccttctgtcaccatcctgtgtatagtcggaaacccctgctccctttccctgcactgaatcttccgtgtgctccttttctccatggcatttgttagctttggctatcctgtctaatttgcgtatgtatttattttttattttgctgcctgttccctcattcccccaactccccaatggcagggagttctgttttggtcactgctgaatccctggtgacctgagcagtgatgatgcagagttgttgtgatatttgtggaatgaatgaatgcaggattttttgttttaccttcacttggcacaaatgctgtggttctgttcaccactcccccctgaagtaatgaaagctatgggcccatccctgtgctgagtggagctggggacacagtgggggctaggacagactgtatccctgccttgtggaacccacagtccagtgggagaggcgacattacccacatagtcatgcaggtgacagaggcaagtgctgtgaggggaagggaaggctgagctctgagagtccgctgctcgtgggagaggggtggtcagggaaggcctccgtgaagaagatgggtgaacagagtgccaggcaaggggtacagcatgtgcaaaggtcttggggtgtgagagcagggagtcttcatggggccaggagaaggggagattgtgtgttggagcgagcagaccagtgaggctggagagcaggcggggccaaggcagatggcccctggcagcctccataggggccttggacgtgatccatgggcactagggagaggtcctgagcaggggagggacagggtcagaactgcgtggaggatcccgctggttgcagcatggagccctcagagtgtatggagcccgtggccaagcagactagaatatttgacatgatttctgtgggtgctgtaaggccctgggtggcgtgagggggaaggtgtgtgtgtggggtggcagggaggagaaggaatctgctctgtgcttattcttgtccccgtttcttttgcagcctgcccacggcttcaacctgcctccagccccacctgctccaagcagacagatggggcgagtgtagggagtgtgtttaaaagaaaaaagaaacaaaaagtctctctcttttttttttttgaagtacccagaccttttcaggaaaaaaaaaaaaagtttcttcagtgccaccttctcaccaaggaggtagaataggtaaaaattcacctgttcagaaacatacagtatagaaagtgaagtttcccatgtctccacccatcagaggaaataataattttttttttttttttgagatggagtcttgctctgtccctcaggctggagtgcagtggtgcaatctctgcttactccaacctctgcctcccgggtccaagcaattctcctgcctcagcctcctgagtagctggaattacaggtgcctgccaccagcccggctaatttttgaatttttagtagagacagagtttcaccatattggccaggctggtctcgacctcctgaccttgtgatttgcccgcctcggcctcccaaagtgctgggattacagtcatgagccaccgcgcctggccagtgatgataatatttgatacgtgttgagcagttgctcttacaggctcttttgggaggacttcatgtggattaactcactgaaccctccaatagccttagaggtaggtatatgcagttattatctctaatatacagatgaggaaacagaggtgaagaaagggaacatgacttggtgacttgcccaaggtctcacagcaggtgacacagccagggctgaaaagctggcatttggttcctgaggctgccttgcctcccgcacccactctcctgcctcttagtgtggcgtatttccttcggatttcttttttctgtgcgtgtgacatttaaacacatacctccccgtgccctgaagtctaagacagtatgccctataaggtccatcattgatcatataactgcttttctgaaaagaatgcgataggtgagttttgtccatggattgcaaggtacatgccaatctcaatgacatcagcatgtgaaacaatacgcatattgtagaattgaggtgacagggcgtgtgtgtgtgcgtttcagaaaaggcatcccgcctgcattctgtcgtgccgcgagccttcgttagcgaatgctgatggtcccagtgtcagcacagcagggctggtttctgtgtttctgtgctcaggatggcttgttgtgttgtgtggccagaccgtctccacgtgctgggtgctgtgctgagcccttccctgcattagcctgtgatgaaagcgctgctgtctgtccttgcaaggacaggaggaaacggaggcttgggagtctagaaagtgggcaaacaaggaccccagtccagatctgcctaactctcaaggctgtgtggcatggtgttgtgggggagccaggccgcctgtacttcctgagatgaagtcatagggcaagtcatttcacttctgtgcctcagtttcctcattgtcatagaaacagtaggagtgtctgcctcaaagtgttgctgtgagggttatattggtatgtgcgaagcactcaaatgggcctggcacgtggtatgggctatgtgagccttgctctttttagtagagtcatgatattaaccaatatatagcaccagacccctgttgtgagcttttagattgttgccaggtttccctatttcagcagtacatacttaggacagcggttgtcagctggtggtggttttgtaccccaggagacatttggtgatgactgaagacatgtttgattgtcgtaaccaggggaaggtgttctgttggctttagtgagtagagacccaggatgctgccagacctcttcagggtgcagaagagtccccacatcagggattctctatccccaaatgtcactagtgttgaggctgagaattcccagcttagaacttctgtgccctggcactagcattttctgcaggagaaattcctccaagcacatgtacattttccactttatgagttttaccagaatgttctcacaagacgctgggaccagtttatagagtggtgaatggctggtggcagatgagggagttggttccctcacgtcttgccccaggtgcctttctcctgagttcccatgagcagatgctgcctgttacaccactagttcctgttgtctttgggttttttggtttttttttttttttttttgagacagggtctggctttgtcacccaggctggagtgcagtggcacaatctcagctcactgcaacctctacctcccaggctcaggtcaacctcccacctcagcctcccaggtacctgaaactacaggtgcacaccaccacacctgactactatatatatatatatgtatatatacgtgtatatatacatatatatgtgtgtatatatatatatatgtatgtatgtatgtacgtatgttttttttttttttggcagacacagggtttcaccatgttgctcaggctggtctcaaactcctgggttcagaggatcctcttgccttggcttcccaaagtgctgagattacaggtgtgagccaccgtgcccggccagctttttttgtttgtttgtttgtttgtttgtttgtctgttttttgagacacagttttgctctgtctcccaggctggagtgtggtggtgtagtcatagctcactgcagcctcaacctcctgggctcaagcaatcctcctggctcagcctcccaagtagctgggactacaggtgtgcaccaccacacctggctaatttttatattttttgtagagataaggtcttgctatgttaccaaggctggtcttgaactcctggtcttaagagatcctcttgcctcagccttccaaagtgctgggattacacgcgtgagccaccacgtccagcttcctgttgtctttgaatttatctcctgagcaagtcttcctccgggcgctgtggaaaggcacagatctgagtgcaggcgacagaggctcctgagggggtcgctgccacctccccaatgagcctccgcagcaccaggaaggagccccacccaccagctccagctccaagagacgcagatctctgcttccccacctgcctccctagcccatctgtgctgtctggcatcaaaaccaggtcagtgagagggggcgagagaaaaaggacttagtaagtggcaaggaaaggaattgagcttattttgagcctgttctgggcacagggcttcactctgtacatgttcattccacagatacttattaagtacccactccactctgtgcccaacaccctacaaagctctggggatccagctgtggctaaggcagccaagagtcctgcctttgtcgtgctgacattccagtgtgggtggtgggctgtcagcgtaagcaaacacatacagtaacatcggtggtgatgggtgcttaggggaaaatgaagggtaagggtaaggggaggtagggtgggcatgctttgcctagggaggttaggaaggcttctcaagaaagggacgtgagcagaggctgaagagagtggagaggggcctgagtttccacctgagggtgcagtgcctgcaaggccctgaggtggggcgtccccatgtatcctggcagctgagggagccaggcactgctgaagtgaagtgccctcagagaagcaaagggggatgttgcaggccgcgtagggtcctggggctgctttggggattttggcttttatgttgcatgggagggttcgagcggagaaggggtgggagctgactcaggtggtcacggggctccaggctgcaggaggggcgtgggcagagtgctgacttctttcactctataacattctctcactccttccctgctgtattcagcagcagtttagtccttttcgttgctgagtagtgttctactgtggatctacgtgtttgtttattcattctcttgtgggtagactcctggtctgttaccagtttggggttactgtgaatattgctgctgtcaacattgtagtacaagtcttttgtacatacactaatttccttgagacgaattgctaggtcgtgggataggcatatattgagctttgattttgactgcttaacagttttccacagtagttgaaccattttgcacctcccaccaataatgagtaagggttctggttcctctacatccgagccagcagttggccttgtcagtttttaaaattcgagccatcccaggtaggtggttatgatttgcatttgcctgtaactaatgagattatgtatgtttcttggttgtgtgggtgtcctctcctgtgaggtgctcttgctctttttaccttgtcttgagtcaacagctgcagctctggcccaggcactcagaagactcatgcccaggaaccttaggaagtaatgagtgtggtggggccgtgcagggactcccctccgcagggcgtgctatgggggttccataggcgagtctctgtccccctgcctgagtgtcctccattggcagccccccgagtgatcaggccatcttttttttttgagatgtagtttcgctcttgttgcccaggctggagtgcaatggcgcgatcttggctctccacaacctccacctcccgggttcaagcgattctcctgcctcagcctcccaagtagcatgtgccaccacgcccagctaattttctgttttcagtggagacaagatttctccatattggtcaggctggtctcgaactcccgacctcaggtgatccgcccacctcagcctcccaaagtgctgggattacaggcgtgagccaccgtgcccggcctaagccagccatcttcttggctgcagtggctggtatttcatcaccacaggactgcgtcacggacacctcagctgaggcaccaccctcagtgggaggacagggcaggatccaggcgggacgcaggggatcttccaactcctccccctgctctccctccagctgtgctgactccttagttgctgagatgagcttgtaaaaagcagctctgttgatcccagcagcggccagggcctccgctgcttctcggctgggagacccgaggtaaacagcttcccttctctcagcttctgtcctcatctgggcatggtcactgactgtctggtggggtgttgggagcattcaggagagactccatgggagcgccggcaccctgcccaaggccacccagctggcggtggctcttggactctggaacccagaccactcttggccatacctggctgcctttgcttctctctggaataatggcagccatgtgtttggctgttcactgggcgccaggcagtaggccgagccctgggcccacagtgggtactttagtgctgctgcattacaagggccctgagaggcgatgtccctgggccgctgtgggccagcgagaggggagatgagacatggagcccctgttctattccctccacatcagcccctcctttggactctgagttctccctcccagccatttgggaagtattttgaactgagcttgcatcagggaaggtgtggtgtaggtccgtgtaggggacgggcttctctcagtcccagccatagcccagaaggcccttggtgttctcccctgtccacctctctcgtgtttctcctcaccaggccccctcctgcctcaggtccttgcattttctgttcccctgctgaaatacatttcctcatgtgtctacacagctcactccctcagttaactcgggtgtctgctcgcaagtcccgcacaccaagctaacatcctgttcttccactctccagcctccccaccacctgattatttgcatattcgtgtatttttctgcccctcacaccagactgtgagcctcatgaaggcagggctgtgtcttagtgacattctgttgctggtaccatccggggtctaggatgcaccccaaaaaagattggtgtcatgaagagagtctggtagtgtgtccctggctgtgtgtggtcctggggtgggggtcagttggggacacttggcctctttcttcatgtgctcattagataagacgctttgctggtctactgcattagcgttaataggtgttgggagggttgctccgagggtgcacaaagagcacacagtgcagcctctgaggtggggaaggcttcctggaggaggcactggtttagctgagacctcaaggaagagagagaagaacgcccagaaggaggtgctgtccctgatggaggccagagggaagggcttgagtgacagaagcataacatggagagtcaggtagggcggagaggctggagaggtgcaatagtcaacgtcatggtccttagcctttcccgagggctttctaggtgcacgtctcagctcatgcacctggaacgcagggcagcagaggcgaggtcctgaagggccttggatcctcagctgaggagtttggcttttttgctgggaacaccagggagccacaaaggttctgagcaggagaaagacaggttcagcgttggggatccctctagctgctgaatgtggggtgagtgggagggagcaagagtggagcgtaggaactcggggaagaggtgggggcagatgggggcagacctgactagagccaggccgcgggcaggatggggagagatggtcacgttagaggttgacacacagaacagtgggagatacagaaatacatacatatttatatattttttgagacagggtctcattctgtcacctaagctggagtgcagtggtgcaatcaaggctcactgcagcctggacctcccaggctcgagtgatcctcctgtctcgaatagctgacattacaggtgcacagcaccatgcctggctaattttttaatttttaatttttttgtagaaaaaaattaggtcgtgagacaagttctcactacgttgcccaggcaggtctcaaactcctaggctcaagggattctcctgctttgacctcccaaagtgttgggattacagacatgagccactgtgcccggccgagatgtggggatgctgaggattgagagtctggcagtcctgtgtgcttgggttgtggggtgccgggcatgttgctggcaaggggagccccttattgctgctcccaccctcgcatcattgcctttgcagcttggagcccagaatgtgatttctcaccctcttgtttacttccctgtcatgtccatcttgtctttcctcccgcttcctaccacttacctcccttctttctgccgggacctgggcagcctgccactgtcacatgccaggcagtagcgtgtccggcccaccagctcccctggggcacgagagaaagctgatgcccatggtgtccctagagccagctgccacttctctgggcgccaccgtagctcccgacctgctgtccgcaaataaccccaggctgggaaaggcaaaggcgccttggtctctgtggaccctggccaggccccaggctccaggtaggggcccagctggcgctgcctcgcgccctcctcccctccgttctgggaacctgagacgaagcagtggcctcggcgtccctcagtctgttggttgctggtccctgaggacagaagtgaaggtcttggggtagggatcagggcctcggtcaagcccccaggactggcttctaggccccagaccgtgcatacgcagtaggttgctttcttgttcaagatcccggattgtctgagacctgtcttttctctgtcatctgatggggggagggaggccgctgaggctcagggaatggcatgggatggcatggggggacgggagtgtgcttagtttgttgaaggtggcaggttggtggcttcctggtttggaaagaagggagaggggagagagagaaaagagtgtgtgtgtgtaagatggtggagggacaggcagatgctggtggctctgcgcattccctcaggtaccctgggctgcctcattcatactgggttacctcagtgttgggccatgggaatgacacggggagggcagggcacggctaccttgatgcttgctcagtcaggagtgactgtgggtggaggggccacctccccccagcatgggtgtcctgagtttggggtctggcctgcgcttaggccggggagctctgcttcccccagattggggtcgctggggacattgccacatctctctgctcagaatgggtccttgagagcgggctccacgccacccttgctggccttaccctttgctgagtgggcagaacagccagagggcctcagagcccggcgtcctcagggaaggggctggtgtggaatcccctcccgccctgaccagctcctctcttgtcttgcagactgtgccctgtccacggtgcctcctgcatgtcctgctgccctgagctgtcccgagctaggtgacagcgtaccacgctgccaccatgaatgaggtgtctgtcatcaaagaaggctggctccacaagcgtggtaagaggccgcttttgcccgccagattctttctcccacgctggctcctcctggaaagctgtgccctgagaggcagaggcggagggtcttaccagcctgaggagccagcattccgcagccccaggcccacagctgcttatgcccccgtttcgtggactccttcagtggtcatctgggcaggagagcagggatctgactgtgcatgagtgatctcattcatagccccattttatagatgaagaaactgaggcccagagaggggaagtcacgtcactgaactaacacagtgaggcagtattcagcattcattcagttagcaagtattcattgactgtgtgctgtgccggatagccccgggctccgagacacagtggtcccctgatggagcttacattccagtgggggtggggcaggcagtaaataagtagacatggaatgtcggggtggcaagtgctggggtgaaaagtgggaactgtgagtgagggacaatgggctgggggcgggggggcatcaagaggctgcccggaggagacggcagtggtcagaggcctggagcctggaggaggtgagacgctggctgggcaagggtgtcccagggagagggacagcaaggacagaggctcccaggtggggatgtgcctggtgttttctggtaacagcgtggctggagcagtgtgagctagggcgagctgggggaggcaagcagaggagcaacgcggagtccagctgtgtcgcgcctgcaggtcatggaaaaggaccttggctttggcactccagacgagagcagccctgtgatgtcgtgagccgatgcgtggcctgatccatttgtactagtgggaagctgaggtccccttttagtgaagttaggacagggaagagaccctttttgaccccagggctgtttgtcccaaagtggctgccacgcaagactgggaggcagatggggagaagcgccacctgctgagagatggctttgtcccaggccagcttctgtgggcctccccctggaaagaaggtccccaggtgtggcggttggctgccctgtgtgcacttgcattcattcagcaaacacgtgctgagcagcgcctgtgggccaggcgctgttctaggtcctggggtccagcagtgagcccgacaggcaaacatcccatcctcgtgttagtatcttgggcgctgacagggaggcagacagctcccaggcagacatgcatgtctcacggtggcgcgagccatggagaaaaaacaagcaacgtgaggatgggagggcatgaggcaggcagggcggccagagggggcttcgctgagaagggggcatctgaataaaggcctgaaggaaatcggggattgagcctcacagttatgccagaggcgacagccaatgagtcctgagggggtaagtgggcttgttcaaagagggggcaggaagctggcgctgcaggcatcgggaagagccacgcatcctgcactgtaccagcctgcagacgcagacagggagcagcgatgagggatggacgcccctccctgggagcagcctccccacctgactgagcagaggagattcgtgtcctgctgctctttctggacagagatggcttttaaggtcccttggcccagtcccccagcctgagcctggagtctgggtttgttgatggagcttcctgagtcttggcagctatcaaggttctaaccctggttctgctgcttcctcttagtgcaactgtgagcaagccatgtcacctcactgagccttggtttcacatctataaagtgggttaacaagccagatctctgatgttgtcagctctacaagggtaggcattttcatgaggcttcttcacagtggtatccccagcacgtctaaaagtggtgggcatacagtaggcactcagtaaatggttgttgaatgaatggttggcgtggtgtgtgggtggtgtgctggggaacacagggtcatgggctcctgtcccgtggcctgcacgtgcggaggccatggctcattaggctggactgtgagagccttgggatgggtgtggaactgttggaggggcaagagtttctctctggtctaggattactgatggcattaaatgagtcttggcccctcttgggccttcagtgtccgcattcatgttacaaggggccagatgacccagccacaggcctgcctctgtcatctgggatggcctagctctgacacacctgtctcaggtttgcaccctacacacacgcttgtgcacacctgcactcttgggccttcccagtgcccatctttctgagtagcagctggcagaggtgggcaaggtgaggtgggccctgctgactactgctgttttgggacctgtaccaccccaccgacccccttggtggttaaaataatggcagtgctggtttactgagcacttactgtgtgccagacacctgtctctgctctaggcaagcctgattttgttgaatttttatagatgccctgtggagcacatgccaccttacagactggaaagctaaggttcagtaggaagagtgacttgcttgaggtttcagcaaggagtgggtagagctgaggttggactcaggccctctgactcctgaactagtgctctcaaggcctggcccacgtgctgcctctcacccagcaagctgtgcttaaggccaagggtgtagtaatagcacatctaatcagagtcactcatgccatgtgctggtcccacttctgacacagctgcagcacaccaccattagcagagcacctgccctctgccacgccccatgctgggctccatctgccggtttagaggcagacggtatagtagtcaagatgtgggctgtgctttccaattctggctctcccaggtaacagctgggaaggttgggcaaactaataggacctctctgtgactcagtttccccatccgcaaaataggaatacaattgtgaggatatttttccttctacctgttttttgtctttttttttttttcatagatatatggtcttgctatattgcccaggtgggtcttgaactcctagcctcaagtgagtctcctgtcttggcctcccaaagtgctgggattacagttgtgagccactgcgttcagcttttaggtttcttttcttagcttgttaccaaagtatgaaaggccacagataaatgcctggataataaactcgccccaatcccagtgtacagttcaagaaatagaataagacggtccccggaagctctcccaagtgctcctcccaagcagttaccgctctcctaacctccagtaacacagatgaggttttttttagtttttatcctttaaaaaaaaaaaaacggggatgaaatttacataacgtgagattaaccattttgaagtgtatgattcattggcctttagtatatcacaatgttgtgtaaccactacctctatctagtttcaaaaccttttcattaccccaaaataaaactttgtacccattaagcagtcagtttttgtatcctatgtcttagttcattctgtgctgctataacatattacccgagactgggtaatttataatgaacagaaacttatttcttaccgttctggaggtagggaagtccgagattcagggttggcatcttcttgtcacacgtcccatggtgaaaggggaagggtaagagagaacaagacagggctgaacttgtcttgtttttttttttttttgagatggagtcttgctctgtcgcccaggctggagtgccgtggcgcgatctcggctcactgcaacctctgcctccttggttcaaggaattctcctgcttcagcctcctgagtagctgggattacaggcgtgtgccaccatgcttggctaatttttgtattattagtagagatggggtttcaccatgttggccaggctggtcttgaactcctgacctcaggtgatccacctgccttggcctcccaaagtgctgggattacaggcgtgagccattgcgcccggccgaactcgtccttttataaggaacccactctgtgataatgtcattaatccattcatgagggtggtgctcccttgacccaaatacctcccatgaggctgcattggggatcaagtttccaacacatgaactttgggggacaattcaattcatagcaccccctgtctcctggtgtctgctaaccaccagtttactttctgtctctatgaatttacctactctggacatttcatgtaaatggaatcatatgtggccttttgtgactggcttctttaacttagcaacatgattttttgttttgagtcagggtcttgggctatcgcccaggctgcagtgcagtggtgggaccttggctcatggctcactgcagcctcaacctcctggtctcaagtgatcctcctgcctcagcctccagagtagctgggactacaggcaggtgccaccacacttggctaagcttaatgtttttgaggttcctctatgtagtagcgtatatcaatatgtcgttccttcttatggatgaataatctctatgttgtagatgtatcacattttgttatctgttaatttgttgatggacattgggatgatatattctttttttttttttttttttttttttttttttgagatggaatctcactctgtcaccaggctggagtgcagtggcgtgatctcggctcactgcagcctccgcctcctgggttcaagtgattctcctgcctcagcctcctgagtagctgggactacaggtgtgcgccaccatgcctggctaatttttatatttttagtagagatggggtttcaccatattggccaggatggtctttatctcttgaccttgggatccgcccacctcggcctcccaaagtgctgggattacaggcgtgagccaccaagcccggcctcggggtgatatattctatatttaactttttgaagaagcagctgcaccattttacattcccaccagcagtgcatgagggtgtcagtttatatccttgccaacacttgtttttttttcattacagccatccttgggcatgtaaagttgtacctcattgtgtgtgtggatttttttgtttttgttttgttttgtttttttgagacagagtcttgctctgtctcccatgctggagtgcagtggcacgatctcagctcactgtaacctccacctcctgggttcacatgattctcaggcctcagcctcccaagcactgggactataggcatgtgccaccacgcccggctaatttttgtatttttagtagagatggggtttgatcatgttggccaggctggttttgaactcctgacctcaagtgatccgcctgcctcgacctcccaaagtgctgggattacaggtgtgagctaccgcgcccggccttcatcgtgattttgatttatgtttgccagatgactaatgatgctgaacatcttttcatctttctgttgaccatttgtgtatctttggaggaatatctctttgagtcctttgctcattttaaaatcaggcagtttgtctttttgttgttgcattgtaagagttctttatgtgttctggttaatagacccttattagatttccaagtatttccacccattctgtaggttatctttttactttcttgacagtgtcctttcatgcacaaaggtttttaattttgatgagttcacttgaagtttttctttttgttgcttgtgcatttggtgtcatctaagaattcattgccaaattcaaagtaatgagatttactcatgtattcttagactttttttgtagttttagctcttatattcaggtcaattcattttgagtttatttttgtatatggtttacagtgtgaagtaggatatcacaaaagaatgtgatatccattcttttgaatgtggatatccagttgcctcagtttcttcatctgcaaaatagggataagattgtgaggataggctactctgggcacattgcctatgggtcactgttccctgctctgcaaggaacagtatttaaattaacaaaaaaaattgtaaggatattttttcttctaggtttcttttctttcgttttgaaaaaatatagtctctttgttgaagaaactgttctttccccattgaatgatcttggcatctgtgttgaaaatcagttgaatgtagatatttgggtttattttttggctctgaattctcttccattggtctgtatgtctgtcctgtataaactgtactgttttgattactatagctttgtatagtaaattttgaaattggaaagtatttaactttatttttctttttcaatattattttggctctttggggccctttgaaattccatgtgaatgtgaggattggcttttctatttctgaaaaaagaaaaagcctgttggaattttgatagggattgcattgaatctgtatattgctttgggtagtattgccatcttaacaatattgtcttctaatccatgcacacaggatgtttttgcatttatgtagatctctaatttctttaaacaatgttttgtagtatacaagcccttcacccccttggttaagtatttttttggaggcttttgtaaatgctttttttttttttttttaagagctagggtcttgctctgtcactgggctggactgcagtggcaccatcatagcttcaatttcttgagctcaggtgattctgccatttcggcctcctgagtagctgggacttcaggcacacgcaacgactcctggctaattaaaaaacattttttgtggagaccagatctcactatgttgcccaggctcgtctcaaactccagacttaagcctgcctcagcctcccaaagtgctaggattttacaggtgggagccactgtgctggtgtttaatagccatgttgaggtaaaactgatgtactacatgattcatccatttaaagcatacagttcagttggttttagtatgttcagagttgtgcatccatcaccatactcaggtttttttttttgttttttttttttttttttcgagacggagtttcgctcttgttgcccaggctggagtgcaatggtgtgatctcggctcacggcaacctctgcctcccaggttcaaggagtctcctgcctcagcctcccaagtagtgggattataggcatgcaccaccatgcctggctaattttgtatttttagtagagatggggtttctccatgttggtcaggctggtctccaactcccgacctcaggtgatccgctcgcctcggcctcccaaagtgccgggattacaggtgtgcgccaccgtgccgggccctacttttcatctctgtagatttgcctgttctgggcattttatataaatggagtcataatgatacgtggtcctttgtgactggcttctttcacttagcataagttacggtccctccacatggcagcatgtctcagtacttcgtttctttttatgactgaatagttttccgttgtatgaatctgctacattttgtttatccattcgttgttgatggacattagggtcgtttccactcgatggctgttatgaataatgctgttgaggacatttgtgtgtaagtttttgtgtggatgtgtttcaccatctccttttaatccttagcagctctctgatgagtgggttctgtgtgtgtgtgtgtgtgtgtgtgtgtgtgtgtttgtgtgcatagggtgcttggatattcatggtgaagaacagttggaaagagtcaaggggcgctgggagggtgtggcagcagtgccaccctgcctggcacagaagtgttttggcattggagctacctgcacagctgtattggtgaatcccagcccatgggatttggccttacagggccacagggcatgtgtgtttggaagcctgggcctcccctgggactaggccaggagctggcacagacagcttgctccttgccacacgctgaggcaactggtgccccagggcactgctgctggcaccttcctgccaggcatgacctgtggatcacccgggctcagcccagtgccccagcctgcgtcagcaggggccacctggagggctcctctgggagaggcattctcgtgtgtcccccgcacctccccgccccgtggtaccccttgtgagtcaccgtcacactgggcctcctgccgcctacctgggacatcactcaaccttgtcctaacctctctccctcccttcctgcctcatttcaggtgaatacatcaagacctggaggccacggtacttcctgctgaagagcgacggctccttcattgggtacaaggagaggcccgaggcccctgatcagactctaccccccttaaacaacttctccgtagcaggtgtgtcttgggatgagtgggtcagtgttctggtgctcacaggatggctggcacgtcttaggggcttgtgggacttggtcattgagccatgggcctgtcctgggcctgcttgcccttggatctgttttcacccttcccctgctctccctccttgttagctggccaggcggggctgtcctgcggggagatgcagagtgggagggagggagaagccagggcatttgcccacacccagccccatgcatcgcctccttgtggttccagcttctgtcagccaggccttggagtccccaactggtggcaggtgcctcccatcctgtgctttggtaacagcctccatcctctgtccctcggacgtagaggggtcacagcttcccactcagctggtcacagggctggcctcgcgtcctctgtccctctgtaatacccaaagggatgtcttccagccagaccctggcagtgaagtttcacaagccccaagctcttgactgagccttggagaatatggtcctgtccacatcgctgcccctttctgccgccttccttccttgctgacctgatgggtcaccatgtcctgttgttctgcctgctaagaacattacagaggcacccccatctccactgccagtgccttagctcagaccactatcctctcctgccatgctgtggaacccagtccccgtcccacgctgctctgcatgaagccttttcctgattgctctccacatgtgctggtgaccctgacacatctgttcccaacctcagtgtctcactagaactcccagcctgtcccaggctgctccttggacacatctccccaagtgtcttcaaggtcctcataagtgccacatcccaacctgaccttcaggcctctcccagctctattcctgtctctgtctcagggacagcaggccgagaggcctgggcctggtcctcagtgccctcttcccatggcctgtctgcagggctccactctggtgtggccccatcctccctagctggctccccacctccctggccttccaacctccagcctcaccctctacatggcagccagagggatcattctcagtctgtttgtgtctcttccctatctaaagccttctatggctccctgctgccctgaggacaaagtccagattctttcccatggcctccaaagccctgcctggctggccccagcccacctctccagggctgtctctcacttacccctcctcacccttggagcagaattggccaccccctgaggatgttgaacctcctctcacctctgagcgtctgttctccgtgtaccctctaagttcccttttccttcagggcttagttcagagaagctgcttcctctgggaagccccccaaccccccaggctgggttggatgctacctctgagcttctgcacacctctaggcttgtccccatcgcggccctgtctatggagccatcactctctggtgggcttctctccttccacacacacacacactagaccctgagccctgtgagaacaggaccagggctgtctcagtccctagagtgtccccagcaccatctagcatggggctaggcctgtgggaggtggctcgggcactttgggctgcaggctagcagggctatcccctcagccccctgctgtctgttccctctgcctgcagaatgccagctgatgaagaccgagaggccgcgacccaacacctttgtcatacgctgcctgcagtggaccacagtcatcgagaggaccttccacgtggattctccagacgagaggtcagtctgggcctctgtgtggctgcccttgagagggagcaagcctggtgtgaggagaaaaggtacagctggagagattttccctgggaccctacataggggtttcctatctgcgcttctggttggggggtctctccagctggggctgagaagagctggggttcttagtctgaagaccctactctgccctttgacttgcgggtgcatcggaatcacaggcagagctcgtgaaatgtctagaccgctgggcctcgcctcaagacctgtgactacctggagatctgcccagggtcagggagctacattcttttttttttttctgaaatggagtttcgctcttattgcccaagttggaatgcagtggcatgatcttggctcactgcaacctccaacctccacctcctgggttcaagcgattttcctgcctcagcctcccaagtagctgggattacaggcgtgtgccaccatgcccggcttagtttttgtatttttagtagaaaaggggcttctccatattagccaggctggtctcaaactcctgacctcaggtgatccgcctgcctcggcctcccaaaatgctgggattacaggtgcaagccaccacacctgaccccccttttttttttttttgagacagagtcttgctctgttgcccaggctggagtgtagtggtgccatctcagtttactgcaacctccgcctcccgggttcaagtgattctcctgcctcagcctcccaagtagctgggattacaggcacgtgccaccacatctggctaatttttgtatttttagtagagacaggatttcgccatgttggccacactggtctcgaacttttggccttaggtgatctccctcggcctccaaagtgctgggattacaggtgtgagccaccctgcccggcaggacctacattcttaatgagcatctctattgattttgaggcaggtggtccagagagtcattttaaaaagatcaatttagtaatcagaagagatgataaagactcatctatttcaaaattgaaacagtataaggaggtgtctagtgggagcttcccctaccctgccctttccatccacctccctgccccccagttaatcactgttcttaggtgccctcaaagagcagagggagacctttgtgcctggctgcctttttttttttttttttaaatacaaaaggtagcattgtacatgcttctggacttgctttttcccttagtgtaccttggggaatttgccttgatatatggagagatgcagctgctttgtttcatgttttgcttttttttttggacagttggacatgcgtgtcccaagtgtgtttatttagccgttctttattgtgatgactggggttgtttccagcctttggctcattataaggaatgctgcagtgaaatagccgtgtctgtctcgtttgatgtgtgcacaggtagacctgtgtgacgagtgcttagatgcaggattgccgaggcacagggaaaataagtttgtggttttgcgatgtttctattaggcgatgtctgagagtgcccccatggccttgtgttttcaaacatttggatttgtaccagtctgagcagtggaaaaattcagcacctcggggtgtttaactttcctttctttctctgtggatgagtttgaccctcaagggccatgtgagttcctattctgaagtgtctatattgtctgtctatttttctgttgggtagttggtctttttcttatttatgtattagctctttatagattaaggagctttgccctttgtaatcagtgggaaatgtttctttttcccactttgtccttttgggcctcactttgagaaacagtcttctagcttatctatggggtaaggtttcagcagaccctctagagagccctaaaatcatgccgtccaagaaaacttccggccattgtggaaatgccctttatctgcactgtccagtaggcacctgtgccaattgcctgtgccgattgcctgtgctgactgcttgtgccgattgagcatttgaaatacagccaccaaggaatggattttttctagtttattttaattgatttaaagagccacatatggctagtggctaccttcttggacagtacagctcaggaacccacaatatcatgagacttgttactataatctatactataattattgttgcacatcctcccaaggtaaaaaatatacttgccccactgaggggaacaaaattaccatctcaagccagctgaggtgctactcagttgaaaactatggaccaaaacatgaatggccagtaaaaacagatcgagaccagtgggtgtataggtcctgggtgttgagctgggttttgaagactggataggatttggccacggagatagcaaggagaaagttcagaagggacagcatatgcaaagacctggaggtgaaatagctcatgcattccagagactacagggggttctgtgtcaccagagaaccaaggggccaggagtgttggaagaggggaagtggaggcgctcgaagctggagagctcagccaaggccttggactccaggtggagatccccacagggcttggcaggcacttagtaaattgcggtttgtcccagggtagttacacgatgcaggggaatgataaataggagcggctgatgcagcagtacctggcacatcaggtactgacaaggtggagctgacaaggtgttttagtaggcaggagagatggtctcgtttccattttcacaagacaacatgccctttcctttaccaagattctgtaggctggagagccccacctgccttttcttcttggtacctgctgctgttgccaaagagaaaactgctggaacgactaagagaccaggtcccagatttctgaccttaactatgggtgggtggagggggtgaaccagaaacccagcaagagggaggccccctccactctgctcctggctgactgatgctgtcctcacagccctggcccacacaggctgatgtcagctggcctctcttaagcctggggagggaggcaggggttgcagggcaggtgggtgccagtcggtgactgcttgttggctaggtgctgcagcgcctcctcactgggctcctggttgcctctccagctggagagaccctcctccctgtcccccacttcactgcagacgtgtttcacatggagaaaagttgaaagaatagtataatgaatggacatccacgcgccccactcctagactctgcagtcccgcattcaccgtgtctgcttcatctggttgtgttttatgctgaacttgaacttgtgttcatacttagtgacattcttagtgtttcagcaggcatctcctaagaataaggactttctcctacagaatcatgatgctgtcacgcctgagatgattataatctttgtttactagtaacttctccttatccatgccgtacttgaatttctttagttaccttttgaaggatatgcaacctttagaacattgttttaaaaccagtattcattcaaggtacatgtctctttgacttgttttatttaatctagttcagccctttgtctttttttttcctccccaagacattgattttttattaatttatttatttttttgacaagccaggctagttgtcttgtagaatgtcacaccttctgggtgtgtcatattattgccttttggtgttgtttacttttgttccccatgtttgtatttcttgtaaactagaattaggccaggaacagggttggcaaactatggccctgccttccatttttgtaaataaagttttattggaacatgaccatgtccatttgttcatgaatagtctggctgcttttggcttactgtggctgggttaagtagttgtgacaaagactgtcttgcaaagcctaaaaaatttaataattggcccttttaaaattttaattaaaattttttaaatttaaaactttttttttagagacaagttcttgctctcttgcccaggctggagtgcagcggtgcaatcatagctcactgcagtctcaaactcctgagcttaatccatccttacgcctcaggatcctgagtagctgggactaaaggtatgcaccaccatgcctggcgaatttttaaatttttttgtggagacagagtcttgctatgttgtccaggccggtctggaactcctggtctcaagcaatcctccctcctccacctcccaaagtgctgggattataggcacaaaccaccacacccagctttctggtccttgatggaaaaagtttgcagacccctggtcttggcaggcaagaatacttaatagtgcatcaggtgagtatgatctttttgttgttgttttgatggggtctctgttgcccaggctgcagtgcagtggcagaatcacgactcactgcagcctcaatctcccggatttaggtgatcctcccaccccagcctccctagtagctagaactacaggcgcctgccaccacaccaggctaatttttgtattttttgtagagatggggtttcaccatgttgcccaggctggtcttgaactcctgggctcaagtgatctgcccatcttaacctcccagagtgctaagattacagccatgagccactgtgcctggccatctgtgatctttttgacgtaaatctttctttcttttttttttagacagagtttcactcttgttgcccaggctggagtacaatggtgcaatcttggttcactgcaacatcttcctcctgggttcaagtgattctcacgcctcagcctcctgagtagctgggattacaggcacgcgccaccatgcctagctcattttgtatttttagtagagatggggtttctctcatgttggtcaggctggtctcgaactcctgacctcaggtgatctgcccgcctcggcctcccaaaatgctgggattacaagcgtgagccaccgtgcctggccttgatgtaaatcttatcatgtattttctctgcttagaactctgaatggctttcactcccactcagagtaaactccaaggtccgtgctgtgtcctgcagagtcctgtatgatccagcgacctctccagaagcatttcctaccacaagcaccctcacttagccacgtgtctccttgctgttccttaaacatgcctagcacatctcttgcccgagggcctcagcgcttgctgtcgcgtttgtctaaggccttcctccctgagatgccatcacagctctccccgactccacgaggtctctgccccagtgttgccaccccagtgcgtcctgccctgcctcccttcgctgtcttgcccttccccagctgtgcttttcttcatagcacctgtccaccaagtgggacatttatatttatgtatgtatctggcacacaaatgggtgttcagtaaatgtttgttggataaataaaaaataattaaattctctgagctagatcctgttccgaggacttttcatatattaatttattttctcctcacaaggcagactatctgtgcacagggagggccccagatgccctccagctgtaaatgcccctctaggtcggggaggtgatggttaggggagagtccccacagtcagctgtcactcctgaagcggtgaggacgggcttgtgcatgaaggacagccctgccacctctgcttcgccgagcttctctctggggtgccccgcaggatggcccagggctggggtccaggccctggattcaggccagctgccgtgtctctccctcagtggggctcagttccctggctgtcatgtggtgtagaggaggaagtaaacatgaaggcactggcgcagggcctgcccatggcagctttggcacacgcagcactggtacctttcttacctctgtctcctctgccaccagcatctctttcctggaggatgccggggtctcctctcactgcccccagtccgtagcccacacagcagctactgacttaaaacagaaatttggagcctgttcccccctgactaaaacccttcagcgacttcctgtggtgctgaggataagacccagatctctaacatggtggcacgtagaggccggagcggtctgggcatgctctcctccctgtcctcatctcctccactcctccctgtcctcatctcctccactcctccctgtcctcatctcctccactcctccctgtcctcatctcctgcactcctctctctcctcatctcctccactcctccctgtcctcatctcctccactcctctctgttggctccagccattctggcacctgtgtgcctttcacagacaccccagcttgctcctgccctggggtctttgccatgcagttccctctgcctgggttcctttccctcccaatcccctgcctccttccctccatttcatttatttcatagctgtgtgccaagggcctgttctaggcactggggatggccattgttcaggtcctggtttaaacgtcatctcctcaggcctcccctgactgccctctgagaaggagtctccctgtttggcccccgccttggagcttctacacacttgtcctccccttgaggtcaggagccatgatgggcttgtcccctgctgcatccacagtgccctgaacaagcctggtgcacagaaatgctccacatttgcaggccggctgggtgaactctcatgacagccttctgagacctcaatgtgctgggcaccgctctcagcactttatgtctagtgtctcatttcaccctgataggaccctctagtgcctcacccaccgaggcacaggaagggcatacaacctgcccagtgttgcctgcaggaaggggcagagctgggatccacgtccaggccatcccccagagcctgtcctctcacccactgtgaggtccccagctggtacggaaggcaggcagcgcattgggtggcaatgaccccacagctcctggcccagagcctgtgcttgccccgtactgtgcccttcccagtgttggtatggcgaacgtggctcccccatgtccctcccctggccctgagcccaaatgaggatgagaaggttccagaaaataccgatgggggaagtgctcttggaggtagaagtgcctgggcacttcttgtgtccctggcctctgtcggtgggcagatgagcctctctgtgcttcggtcttgtcattttagcatgaagtgaatggcagtacctactacacagggttgctgggagggcgacaggagtcctccaccataacgcacagtggtaccagcctctgcaagtggaaggtgttcttgggactgctgttgagtggcaggggtgggggcccctctctgaaaagcgggtgcagatcatggcttacgaggagagttcttcctttgcttttcccgtgggctccctggctgggtgtcccatgagccttccctagagagggtccctgctttaccctcctgagtctcgtgtagctttcagcgcttcactgaggctcagggacaggcgggtggtgctaaggaggagtaggctgtgcacaggtgagtgccagctctgccacatccctgctgtgtgaccttcacaggtgactccacctccatgtgcctcagtccccacagcagaaatgctggctcttgagaattgcagtgctcttgagaatcaagcgaggtggtgtctggagctagccactcagtgctgttatttttacagtcgtggtttacccaggggctctcctctgggggctagaagatacttgaggcccagcttcatggggagctcccctttgccccagacgccatgttgcaaacccttgagaaggatcctggacagaggcccttgcttttcatctggaattctgagtgctgcaaccttgcaactttggtccagttagaattggatcggaagctagtcaggcagcaggcgagccccagttactcccagataacctcctgcattgctgtggtttctggagctttctgtagggtgggcagtgggagccagggtaggtggggtaggcccgcccctgcgagtgtcttcggcaccctcccttccaccccgccctgcgcgcggtgctctgcgccgacagcccgccaacctcttagccccaggcccaggccctggtggaggggagagctgggagggctgagctggtccaggtggcagagccactcttggagccccagctggggtgggtccagggcctgtgctcctgattcccatctggagtagcctcccagagctgcttctgggctggtggtgtggcagtgccatccttcatgtatttgggttctctccacagagggaccatctgtgttctctccacccctgtctttgaaaacaaagatgataccacgctgtacatcttagtctgcaatctgccatcttcacgtgacagtctctcaagatctttatatatgagagacatattttcctttttaatatcttcactgtatctcttaggagatctgtgattttttttttcccaatccgccatcatttactcagagtcagcattaaaaaaatttaaaatttgtgagaggacaactatgtctgataaagcatgtcatggaaggctgggcacagcagctcacacctgtaatcccagcacttggggagaccgaggcaggcagatcatgaggtcaagagatcgagaccatcctggccaacatggtgaaaccctgtctctactaaaaatacaaaaattatggtggcgggtgcctgtagttccagctactctggaggctgaggcaggagaatcgcttaaacctgggagccactgcactccagcctggcagcaaagcgagactctgtctccaaaaacaaaaagaaacaaaaaagaaaaaagcctgtcatggaatgggctcctgccctgtccccgccccctgcttttttttttttttttttttgaaaaacaggaatattagtgtagggtttgggaattaggctgtaatttgttcctaagggggcatgggttaaagcaagttgagaaatactggcttgagatgttgggccagggagtgcagaagccaacaccgctctgcccgggtgtgcaccagggctcagtgcgtgctctgcccgggtctgcactgggccctgctgcgccctggccctggggccacttggactttggctgcctcactctttcattacccaagtatctactgagtatccaccatgagttctgggggcagaactgtgttcaaagcaggtggaaatctctgcctccgtggggtggacatagatgggttatggggactccagtctctgagtgggtggggagggcagcgtgccttttgtaattccagctaccaagcctggagcaactgctgtttttctggaatctgttttttcaatctgtgccccagttcctccttcataatgggtgggagtagggatagttgatgatagcaagtgcttcccatttgttattagaggctgttcctttccttcgactcccagttcccctcccttggaggcaggcagggctccaggatcatgacttctcttctggagatgtttgtgcctatgtgagcatgtgtctgcagaagttcattattttctaacttaggagcacagaactgtatactgttcttcaccttccttaattttgaaattttttataaaggcgtggtcttcttatgttgtctaggctggtctggaattcctgggctcaagcagtcctccagcctctgcctcctaaattgcagggattacatgagtgagctaccttgcccatccctgcaccttcctttttctcttaagaagtctcagatcatcccaagtcagcatacagacctgcctcaatctttcccccagctgcagaatgtctcattgcacagatgcctcacaggcattctacctcacgacagcctgtgtattaaacactgctgtgatatttcatcaaatcgaaggcgctgtcattggggaggcaccctgtttcatatagtgccaagaaaaaggcgtgcccagttaaatcaagacagaccccaactgtgagattaatctgcattccagcagtgtcaaaatgtggaagagggtgcgttgtgggatggatggaaatagaagtagtttcgcgtggtacaccaggaaacgagactggggaggaatacagcccagcagggtgtcccggcttggattttgaagcccagtcccagccacacttgttccctgcctgaccttgggtaggggccccagtgtctcaggaacacaggagcagtgacacttgccctggggcgggggccatcctggaagatgctgtgaagggctggctgcactccctgtggcttatttaaatcactgggatttgcgtgattacactctctgaattttctcattcttagtgaacattttatttttcttgttggtcatatgagtattttctagatacaagcaaaatacacggggggttcaaaatgcgttgggttgaaacacctaattgcagtgtggtcaaaaatgggggatgtggacaatttggtgtaattcagcctaatatatttttcattttggtctctggtcattttcacttattagacagaacagtttgtaagtatccaaagaaaattattttgttttttttttagctgattgcagtggtatgatcatggctcactgcagcctccacctcctgggctcaagcagttctcccaccttagccccctgagtagctgagaccacaggcatgtgcccccacacctggctaattttttatctttggtctctacaaagtgggtatccatgttgcctaggctggtctcaaacttccggatgcaagccatcgtcccgtctcagtctcccaaagtgccaggattgcaggtgtgagccaccgagcccagctcaaagacagttctttctcagcaagttctaaaccatgagtgacagaactagtttattgttctttattttattattattattattattattattattattattattttattattattttgggatggagtctcgcactgttgtccaggctggagtgcagtggcgcgatctcggctcactgcaacctccgcctcccgggttcaaatgatcctcttgcctcagcctcccgagtagctgggattacaggcgcccgtcaccacgcccggctaattttttgtatttttagtagagactgggttttactatgttggccaggctggtctcgaactcctgacctcaagtgatcctccaccttggcctcccaaagtgctgggattacaggcgtgagccatcgcacctggcctgtttttattttttatttttgttttttaaaaactttttaagagatgggtcttgctttgttacctaggctggtcttgaacgcttcggctcaagcacttggtccaccttggcctcccaaaatgctgggattacaggtgtgagccacagtgcttagcctctagttaactgttcttaaaccaggctcccttctgctgggacctacttcttgtccaccagcttctctcctctacatccctgggctgccaggacctctgtccctgccatgcagactccctgctcccagtggactgtcccctccagggagtcctgcgggccagctcttgccttgcagtgtcttcagctcctttggctaatgaatgctgcttcttactcttggtttaactttacaaaacattggtaacttataaacttgagcttgtcatttgttccgaagaattcacaggagcactctctctccctcattcaaggctcagggtggtggctcattttcaaggggctgtgaaaagagagggtcactcctttttgatcatttccctgctgcctggcttcaaatggccctcaggccaggtcactttagggaaattggtgatcgctcttggtattccactttttttttttttttgagacggagtctcgcactgtcaccaggctggagtgcagtggtgcgatctctgctcactgcaccctccgcctcccgggttcaagcaattctcctgcctcagcctcctgagtagctgggattaggcgaatgccacccctgactaatttttgtatttttagtagagacggggtttcaccatgttggccaggctggtctcgaactcctgaccttgtgatccatccgcctcagcctcccaaagtgctgggattataggcatgagccactgcgcctggcgtggaatttcactcaggtcccttcagctctctctggttctgacagatcttgcccaaattcccatggttatgtggtcatttgcttgcctgttgctgggggtggctgggaggtggcactcagctgttcgactctgaggcccaggactcctggctgctgggactcacgtgtgtccctgcacagggaggagtggatgcgggccatccagatggtcgccaacagcctcaagcagcgggccccaggcgaggaccccatggactacaagtgtggctcccccagtgactcctccacgactgaggagatggaagtggcggtcagcaaggcacgggctaaagtggtaagtgctgggagcaggggtggggctgccagcctgcggtgcccccacccccagtgctggcctgctctccttggtttccataacacagttcagggggctcagctgagagacaaggctgccctgcagggtggggtgatttcaggtggcaggtgccctagggtgtgctccatgcccgtaggggagggagcaaccttgggtggacccactgcaggttcgtcctgggagttggtgaagacctggctacccccacgtcagagcccagccctcccaaggccctgtgcctgcagagcctggtctgaaggccgcttcagaacacacagttgctgcccagagcctcccttcctgctccagcctaagccgtttggcaacagtgtcttttggttttcctctttcttttgttaaaatttcctcccacgggccatgagccaggcgctgactgcccccactctccctgtccctggcagaccatgaatgacttcgactatctcaaactccttggcaagggaacctttggcaaagtcatcctggtgcgggagaaggccactggccgctactacgccatgaagatcctgcggaaggaagtcatcattgccaaggtgcgtgccccgggaattgcgctcgcgagcctctgtgggggctgcggtctggagcctgaccctgaggcctggacgcttacccgcgctttctgctgctgtgggcttatttcccccacaaattccccctagtcagaaaagggggagcctgaggcccagagaggagcagcaggccttgctgctgagtccccacctccaccctatgttaggggctgggggtgcctgtggagagagagagcctcggggccccacccagcaggtactgtcaagggaggctggggcctgttggggaggacgtcgctgttggggagtcccgggctttgctcagggtatcccaggtggaggccgggccaggagtggaattctactttttcccttatttgaattttttgtagtggaagattccaaagacattcaaaaatttaaaaagaaaataaatattacggacccccatgtagccattgtccagtttaaccagttatcagcgtttagccagccttgtttccttagctctgcctgtccctcttgttctggaatactttaaggcctgtcctagacaacacgtcacttcactcatccatacttgaacatgtgtcctgacagatgaagactgtaaagaatataatcatgtggtgctgccatcagagccaaccaaattagctgttcattcctgatgtgacgattgggcctaaggcagccttcctcagcctcagcactgttaacgttttgggacagatgattctgcgctgtcggggcagccctgtgcattctagggtttcagcagcacccctggcttctacccactgaagccaatactagctccccaagttgtgacaatcaaaaatgacttttgggttgggcgccacagctcacgcctgtaattccagcactttagaaggctgaggtgggaggatcgcttgagcccaggagttcgagaccagcctgggcaacaaagcaagaccctgtctctgtaaaaataaaaataaattagctgggcatagtggcgtgcacctgtagtcccagctgctcaggaggctgaagtgggaggatcagtggagcctcagaggttgaggctgtagtgacccatgttcacaccactgcactccagcctgggcgacagagccagacccccagctaaaaaaaaaaagggaaaaaaaaaaaaaagacttcagacattctcaggtgtcccctggggataaacttgccccagagagagcctgtgttcacgttgctgcaggtggctccagatttttggaaccactcctggtggttctgctgtacagtcaggtaccaaattagaacctgaattagagtcacccaaagggcttgtgagacagtgctgggcccaccccgagtttctgactcagtgggcctgggggtaggtcccaggaatttgcattgctgccagttcccaggcggtgctgaggtgctgtgtggggaccacaccaagaagcactgtttttccttctttgggcaagaatgctttctaggtgggacttcccacagcctgtggtggcacctcggggctctcgtgatgtctgtttgtctcccttgcagggacgtcacaggtgtcttgtccctagcagcctggtccttacattgtgacattcctgctgacttttcacctgtggctttgagagccactgatgatcctcgtctgggtctgctatttgctgagggtttgcaggctttcacttttcactcctgtgattttctgcatttatggctgggaatggaattgcatttcacaaggccttgctccccttcgtcggggcggagtgggcaggtgtggtgttgcccaccagcccctcacccgcagtctgtctgcaggatgaagtcgctcacacagtcaccgagagccgggtcctccagaacaccaggcacccgttcctcactgtgagttgccctccccttcccagacagtgtgaggccagcctttggacagagctcagagagagagccctaatcttctggtacaaagcacagtcttggggtaggccaggcgggcagggcaaggtgttgctgcgccctgccaagtcatccgaaccaagacatgtggtgggggtgagcaggctcggggagtgggagggtgacagcttcttcatagatggtggcttcatgtaagcatttgaactaactgaagatatcacattatttgctggctgctgtctctatgagttaggagcacttagcccagctggttgaagtggaaacattattttttttgtttttgttttcagatatgctcatagaagcagatgtgttagcattgtgttgtctgtcagcctggactgagtagatgcctgtttgggctgcagtctccatcaaggccagtggccaccagttaaatggactagattgaggatggcttatgtatcatttctttatctcagttgctgtccaggtatcctattaagccacagtactttttcaaataaaatcttatgaggtacctcagtgcagaaaacagaatagttgagttgtcatgagctgaaggaccccctggtgggagtctctgaggaactctctgtagatctccttagtgcagtggagaactactgtttgttgactgacagcctgtccatcctgtcattgaagttggctcccaagcctttgccactcccagccacagcagacatcacttgtgtgtgtaagttgaacacattttactgtaaaaacaagagccatggttgctcagaacagctctagttctcccttggctgtgcctgatggaggcagaggacaagatggttcagcatgtaaccctttcctaccgcagagccatgccttcacttaatgccccaaaaggtgcagccggtatgtgaaccccatatggctgactcctgggggccccagccagggcagggtgtgtgtgtgcagaataagcagggccagggccctgccctggcatggctcagcagagccctcctccctcccacctcccaccctgctgccttcatcccccaggcgctgaagtatgccttccagacccacgaccgcctgtgctttgtgatggagtatgccaacgggggtgaggtgagccgcggctgccttgactttgccctctggggcctccttctttagggtggggcgggatggagaggagctgtgggtgagatggaagggtggagggaaatttcagtgtcatctagtgcccctctcccttgaggcaggcggcttcgtctccattttgggggggcagtcactgaggctcagagaggttaagtggcttgcccaagtttacacagctagtgagtgggtgggtcaggtccaaaccagtccagagaggtgtggagagggctgtggggcgatagcactgggaaggatggtcttaaaggccccagagaaagcccccaagggttaaaacctagcagccctccgttcccgtgtcctctcgaagtgaattcccgcagccgctcagcttccccttacagagtcgcctcacttttgtcacccactccttgcctcgcgccttctctgtgcagtggttggcacacctgctttgggatgcgtggtttgctcatctgtctgatctgggcttgcccatggcctattgttacttggtcatgacgtgtgcttctttttgcctccatgccatcctccctcctgtctcggatgtctctcccataccctctcatgggtgcctcctggcagaccctcgcccttccccccagctctgtgtcacttatgagcttctgcgctctgccttgattggtccctctagctgtcacttgctggttcatgatacaggtgtcaccacatcactgcgctggggcagggggctgggaaggtgagggcaggtgggtgggctggggcctgacctcctctccccaccccttcctcctgcagctgttcttccacctgtcccgggagcgtgtcttcacagaggagcgggcccggttttatggtgcagagattgtctcggctcttgagtacttgcactcgcgggacgtggtataccgcgacatcaaggttagtggcagggtgtgcgccaggctgacctgtggcatgcacaccacatgggactcacactggggaagttgggctgagcttctgccctcattcgccaggctccccaccaaggtccagggtggtggctgccctcattcgccaggctccccaccaaggtccagggtggtggctgccctcattcaccaggctccccaccaaggtccagggtggtggctctgtggcaagttgccccaagtagggaccttcccaagcctcccatgagcgctcctaggccactagcggagtgtcaactgccacaatacctactttatttgtatttatttatttatttatttttgaggagtcttactctgttgagtgcagtggtgtgatctcggctcgctgcaacctctgcctcccgggttcaagcgattgtcctgcctcagcctcccgaataggtgggattacaggtgcccgccaccatgcccagctaatttttgtatttttagtagagacggggtttcatcatattggccaggctggtctcaaactcctgaccttgtgatccacccacctcagcctcccaaagtgcttggattacaggcatgagcccccgcgcccggccaagtttagaagatagtttggcagtgtccaccaaagctgagcaccagccatctgccctagctgtgtgcacaggagaagtggggacacacactcaccttagaaagtgtccccctcactcagcagcaggacttactctagccccaactggaacaacccaagtatccactgtgagaggaacagtcagatccactgtggagtgttctcacagtgggacgccacacagcagttaggaatgagctacagctacacacgacagtgtggacgcgtctcataggctaatgtcgagggaaagccgcacagaggaggtgagtccacagttcacaggtgtgtctgtgtgcagtggtacagatgggaagtagaggttaattcttgtgggggatggtcagtaaccgggaggggcacacagggccttccagggggagatgccacctcagcctcgcaagtagctgggactataggtgtgtgccaccatgcctggctaattttttttttcatattaagaaatatggagatggggtctcgctgtgttgcccaggctggtctcaaactcatgggttcaagcaatcctgccacctaagtcccccaaattgctgggattacaggtgtgagccactttgcctggctgcatatttcataattaaaggacagaaagtctagaaaaaaagaatagaagaaagctagtgcccccacgttcgaaataagaaccacagttcacaatggggacggtgggtggacagggcctggctctcggctctccctgcccagctgttcccaggtaccatgggggtgggccagagggtgaggagggttggatctggcctctctctgagcctcagagggtgaggctgtgtgtgctgggcccagcctggcatgggagggttgatgtccaggagccccgggcatctttccctggaaggaaaggctggggtggcaggaagccttgggagcatgcgcctgagatccgttgacttttccaacagctggaaaacctcatgctggacaaagatggccacatcaagatcactgactttggcctctgcaaagagggcatcagtgacggggccaccatgaaaaccttctgtgggaccccggagtacctggcgcctgaggtgtctggggttggtgggggtaggaacgtgtgaggccaagggtagggggatcccccagacctgtgtgtttccagcccagatgccctgagggcaggactgtgatgccagcctcagggccacgggcccagccctcatttctcctccatcctcaggtgctggaggacaatgactatggccgggccgtggactggtgggggctgggtgtggtcatgtacgagatgatgtgcggccgcctgcccttctacaaccaggaccacgagcgcctcttcgagctcatcctcatggaagagatccgcttcccgcgcacgctcagccccgaggccaagtccctgcttgctgggctgcttaagaaggaccccaagcagaggtgagggctggcgtcggccccacccagcccagcgccagctgctgccactgtccctgcggcctggagggggcagcgtccacaagggtgctcgcttgtagggtcgcagtgtgtcgtccccacacagcccctgaaaacgtccacagtggcacttagggagtgcttcccccagggcaggcccatccttgacactgccttattttatggggacactgaggaacagggcatcccctgggcctggctggggccaccaaaccatatgtggcagagccaggataggaacggagcctgccctactaactccctttctggactcagggtaaggccaggcagtgaggacacgtgggtccgggttgctgactccctggctctgaccctgggcacgtgagctccctccctgagcctcggtttcctcctctgtgaagtggtttgtggtcaagacagaatcattaagggccatacagggcctgcctgctccgaaagcccgtctgcccgaacccagctgctccgggaggcaggtgctgacggccgtctctgcacaggcttggtggggggcccagcgatgccaaggaggtcatggagcacaggttcttcctcagcatcaactggcaggacgtggtccagaagaaggtgagccccactgcttgccccagcaggaccctcagggacctggcccactcgtggtgaccttggttgaggcctcctggcctcagggtccctgagcctgagctcctctcctccgtagctcctgccacccttcaaacctcaggtcacgtccgaggtcgacacaaggtacttcgatgatgaatttaccgcccagtccatcacaatcacaccccctgaccgctgtgagtgcctggggcccccgcgctggtgtgcctgccccaggggtggagggatgggatctgctcttaactcacttctcaaggagggccctcgaaggcccccgcttcatgtctgggagatttccccaagtctgctctcaggcccttttgctgttggtcctctttggacctggtgaggccaccaggagccattgactgcagcacgttctggagctcagtcggggggctcagggcaggaggcagcccggtccctgagcctggctgggttcactgctttacagctgtttgggttcttactctgaactcagcccagggctgggctatgctggggacacagcactgattgagccagccctgggccctgccctggaaagctcccagcccaggtagggtgggcggcctggagtggtcagggctagggcgtgggaggccagggactggggaatcccagaggaaatatccgacctggcctgcagttagggagggctttctagaggaggaagcaaacgtgtcagctggccggaggaatgacgtgtgggatgccagcaatgggagaagcatggcatagctaaggaccggcagcagccagggagatggtggtgagaagagagggcatggggctggagtgcaagggtctgggggccactgggaggggtggggactgcttgcatggcgggagccagccatggaagggtttcatacagagagggacagggttaaagcaggcctttagaaagcccccctggctgcccgtggagaatggatgggagggtgcgagaggcaggccaggacagggctctgggctggactctggcatggtggtgtgtggggcagagagaaggtgggaggctcagaaggccctgccagctgtggggcgcatgggcaagggcacaggaaactcccagaggaggccgcccggggctcaggtttggggagtgggtccgtggctgagggcctccattgcggagggatgggcctttcctgtcctgtcctgtgggcagcccccgccagctggggccgtttccccagggagtctgggcaggtgtcccaggccctctcctgactggtcctccccatccacctctgccgcccacagatgacagcctgggcttactggagctggaccagcggacccacttcccccagttctcctactcggccagcatccgcgagtgagcagtctgcccacgcagaggacgcacgctcgctgccatcaccgctgggtggttttttccccctaactttttacttagcctttttggtttgtgtccccacccccacctcctcaccccctttccagttcttcttcaggcccctcccagacgcaccccagcggcccctgcagcccctgcctccagcctccagcctcacctttgtgcccagactcgcatttggaagactccacctcccgcccaggcctgggctgttgggcggttggagattcaggttttaatccacacaagccccagtgaggggtgaagcatggcgcctggggcctgcctgagtttctggcctgggtgtcgtgctggtgtctgcctccgcgctgctgcatctggacgaaggctgccttctggtgggacgcgacacccggcagacagtggtgctgccttccaggccccgtggcctaggctcggagtggccaggcacggggcggtccaatcccccacccgctgtccccctatgggggcagaaaagcaataatgtccaggggcaggcaggggcccttgggagctgcagggctgggggttagggctgctccctggtgaatggagtcagatcctaggatctgtaccatggggaaccaggagtggccgggctgggtgccgcctcctggtccggcctcctccccaccaaactgtcctcaccctatggatgaggcaggaggaacatttggggccaaacctgcctgcctcccagccccgtgccttactagggcttccttccagctggccttacctcccgctggaccctgggcctggcctggccccactgggggctatgggctgggctcaccctctcctctgcgggggtggagggccaccagccttggctgttacaatcttacaccggacagtattgggccccatggacttggtcagggaggggtgggggtgggcatctctggtacctattggggtggggggcctctgaaaagggaggctcctaggcccccctcacccctccctctccccagggccccacgttctgcagccttaaggttgaacatgagtgcacgtccatgtcagtgctgtgggactcctgtgcgtgcctcggactgcgtgtgtcggcgggacgcaggcacacgtgggtgtgtgtgcatgtgtgtttgtgtgagggcagcgtgtcctccagtgtgcatggtgtgtgggcttgggccccatccctggcccgagcatttcatcctgtgggggaggggtgctgacctagtgggaggagccccactgtgatccatgagctgccctgcccacgcctcccctccctgtagcaacacctctgggtgtttggagtttagcttttgtgggtttgctctccctatcccatctcctgtactacacagttcatggcagggtggggaggggtggggttggttcgggtgggtgagggtctttttcctctgtgtgcgatgttgttatctgacagttctccgtccctactggcctttctcctcgtcttcatatttgtacggtacaagcaataaagacactcatttcagaccagggcccagcctgcactcacgccagcccaaccactctgggctttgccttggtgatggagtcagacccctgggccccagctcctcctgtactagccgttcccttcagcaaggagggcactgagctcagggtgagggcagctggggtgtgtgcaggagctcaggctggagagggtgggtggagctggtgctgtggggctgaggggtatgggaaggctccccgcatgtgggggtggggtggacagagaccactccaggccctcagtgctgcttaggctaagagaggtggggtggagggacagggctggaagatctgggtagcccagaatgaggagggtgcctgtgctgtcactgaatgagagggagtggttcattccacccggctgccgagcctcagaggggggcattcctatcctgccccacctccctgtttatgctgccacctggaagccttgaggcccccaaattccagtacagacccagtggtgtgttcatggtggcgtggttgctgtcacctgggagctcctgagcgtttggttagaaccctgttcagcttggggtcagccctcccctagtcactgccctttagcctggatgtgtctgggcccctgcacttcccgtgcttgagtcacgtggctgcatggccgggcgctggccggatggaacacctcccccagcaagggaccagggaccagagccctggcctgccctgctgagccctgctgtgcagagggcctggcacagatgaatttgagattttgccgcaaggtgttagcacttcacacccattgagtctttgagattttaagtgaatgtaagcagaaaaagtcagatccaatttacagaaatcagagttagctacagctaggactcgtttggttggggttttttagtttgtctttctaaagtcatgtggaccttaatttaattacaaaagtctaccctggtggtcataaaataggcaggcctatgaagaaaggccttttactcttccatctcgtcccagccccgagttgacccacgttgctgctcctcacaccatggtgatgcaggtctcgtagtgtgggcacaggcctggctacctcatctttttagtgcctctctcctcttccacaggatggggtcccacagctgcagcagctggccccgtagttgagcatgtgtggttatcctgtagagcttttcccaagaagggtgtttgaacttagagtcttaataaaatcttaccaaataaattttgagtagaataatcgtcttttgcaatgtacattttaaaaatttcacacattcttttttgtatataaagaacagtgactgggcacagtggctcatgcctgtaatcccagcaatttgggaggccgaggcgggcgggtctcttgaggccaggggttcgagaccagcctgggcatcatagggagaccttcatctctacaaaaaatacaaaaattagctgggcatggtggtgcatgcctgcaatcccagctaacttggaaggctgaggtgaggtgggaagatcacttgagcccaggagtttgaggctgcagtgagctatgattgcggcactgcactgcagcctgggacaatgagactgtgtctctaaaaataaaaaaaaaaaaaacatgatacatgctattaaaaaagacagcaaagcaggagtataagaaaggaaattcacccgaggtcgcagggccttgagtactcattttggtgctgattacctctctgcaaatggacacggcatcataaattggtagtttcctgctctttttgtgtaatcttttccagttaatgtgaagcctctgggggctgccctcgtgcactgatggttgtgtggagtcgggggcggcagtgcgattcccttttagctgctgcatggggggaactcaggctttccagctgcttcctggggttccatggggtagacccctcaaccgcttcagctgccccgttaacaggaattgacttggtttcgtttggtgctaccagcagtcctgtaataaactagctatccatctgtactgtgctggtgcttttgtttgtctacatcccaggattttaatgtccagtacctttccaaaaaagtgtagccattcagatactttaaattttgaaataattgcagacttgcagaaaactttcaaaaatagtgctgtactaagattattccaggcctggggcaggaaatgtacaagatgagcctggggcatcttgcagtgcctgaaagcacgcactgatatgcttaagtcacagggacacaggagccaacagaaagcttccagtggccaaagctgaaaagaatttgaacaacaaaataaatagcataatattgggttttcacctaaaatgtgaaataagtctattgctaagtggcaaaatggggagaatatgcaaatctacacaaaatcataagtaatttctgtagacagccttcaaggagggctatggaacccccacttcttaggcgtgggctgcagtgactcctccaaagagtgcagtgtggagagggggaaaagtaacttttcagtgaaggtccctggcaaacactacatcatccagccaatcgaggcaaacactgctgatgaatcaccttcacagtgtccctttaatgtgatagaatggcactttccctctgatcctcctcttgcagacacacaccacctcactgagaggaagcagacatcagacagatctcagttgagggatttgtctgccaaggtggttaatcagaaaattctgagaaagtgacacatccaagatcaaccaaaagagtcatggtgactaaatgtaatgtttcctgaaatagaaaaagaacgtagggaaaaaggaaggcttgaataaagcatggacttaatagatgaatattggtctaacggattgtgacaaatggggcacactaatatgagatgttcattggggaaattgggtgtggggtaggtgggaactgtcaatctattcaaaaaagttatgtagaagaattacaaaatatacccttcgccaggttcgtcatagcattttacttaaaacggacaaaaatgggatcagaatgttaaattcacccctccacctcccgctccacattgtatacctgtcctaaagaacattctgctacataactgctctccagttaccaaggtcaggaagctaacattgaaactgctcttctgtacagattttatagtgttcgctaatggtcacgcttaatgtccttgtatgttaaaaattcctagctaatgaccaggctcacatgttgcattcagttggcaggtgtgaaactcacagggcagttattttgcagttattttccctcaaccagggttggttgcctcactttttttttttctcttttttttaagacggagtctcactctatcgcccaggctggagtgccatggtgcgatattggctctctgcaacctctgcctccagggttcaagtgattctcctgtctcagcctcaccagtagctgagattacaggcacccaccaccacacccagctaatttttgtatttttagtagagacagggtttcactatgttggccaggctggtctcgaacttacctcaagtgatctgcctgcctcaccttcccaaagtgctgggattacaggcgtgagccactgcgcctggcctaaaagatatatatatatatatattttttttttaaagctacttacgtctctccatttgcccgcaaggaaattccttgtggacagaagacaggcagagttcaaagtcatccctgtgctcacatgagaccaatgcatatctgatggcttcctccgtcctattgtttgacccagactaggcatggatggctcttcctgtaaattgtgcattcagtaaaaggctaatcaaactcaaaagaatgcagccgtttgtctcctgtctatgacctggaagccccctcccctgcttcgagttgtcttgcctttccggaccgaaccaatgtacagcttacacatattgaggacgtctcatgtctccataaaacgtataaaaccaagctgtgccccgaatacctcctgaggccgtgtcacacgcacacccttaactttggcaaaataagctttctaaattgattgacacctatctcagataccttttggtttacacagttaataaacatcttgtgtagagacattttgtagatatcccgattcctatcagatgttcacccactagtttgaacatctattgatatttcttgcatgaaacgatgctgtggtggttgccaaataggattttccaaccttctacattattagttcggccagtcatggcggcccacacctgtaatcctagcactttgggaagccaaggtgggaggattccttgaacccaggagttcaaaaccagcctaggcaacaaagtgataccccagtctctacagaaaaatttaaaaattagccaagcatgatggcgcacacctgtagtcctagctacttgggaggctgagatgggaggatcacttgagcctaggaggttgaggctgcagtgagccgtgttcacaccactgcactccagcctgggtgacagagcgagaccctgtctgaaaacaaaacacatttattagttcactttctaaagattagaagagcttttctttcccactgcctgagttatatcagaataaacttgtattttaattttattcagtggtttgtgatctatgactatcatcttgatgctcacattttctagatttagctagtgacttctgcatctatgtgacttgccctgctgttgggacactttctgccacacaaaaatattccagatcttgtaccttctcttgtatgaccctgggatcagccatttctccaggtagccctggttccttttagtggagaatgggatgtggcggccagggtttggatgttaggggtgcttctcactattggggtgtcgctgctcttaagctctcccagtggattaagctaggaaatacatgtttgcatacacaccactttttaaaaaaaattttttttttttgagacggagtctcgctctgtcgcccaagctggagtacagtggcccaatctcgctcactgcaagttccgcctccagggttcatgccattctcctgcctcagcctcctgagtagctgggactacaggctcccggcaccacgcccagctaactttttgtatttttagtggagatggggtttcacagtgttagccaggatggtctccatctcctgacctcgtgatccgcccgcctcggcctcccaaagtgctgggattacaggagtgagccaccacacccggccacacaacacttaacttctatgtaaacaaccatgtgttcacacaattttatctccaattccattgcgacaccgacaccacaagggtcattctaacctccgatctatgtttgtacatccatcctctgacggtgcaaaccctgattctacattttgaaatcatcccgactttatggtcaggaaagcgaggcccagaggggctgcttccgggcagcaggatgaggatctgtctccagctgtccgaccttagagggcttcgagaggacagagccagcctgcggggcactcacctttgtgcacctgcccgggcgaggcgggctcagtgcgcacgcgcccaggggcctttaaagcgcccgccgcgcgtctcttcccctagctgcaagggtcggtgcttggcctcgcccgcaacaccctcctggaggatgctggtgagaggcagggaccaggggtccggctcccggctcgggcctatcgttaggcgctgggcccccaggccctctcctttgcagagtctcgctgcctccctcgacgcagagccttcaagcgccgcagtccccgacggcttccccgcgggccccactgtctccccaagacgcctggcgaggccgccggggctggaggaggcgctgagcgcgctggggctgcagggagaacgcgagtacgccggggacatcttcgccgaagtcatggtgagcctacccgccgcctgccctggtgagggcgacgccggcccaccgcccggcacccactcaacaccactctgaactcccaccgctccagcctctcctccctatcactggcagccggcgttccttccctgcaacgtccaggcttttgttttgttttcacacagcgccgtttctaccgctgggaatgccctttcccaccgtccccgggctctttgcagtccctcctggggtgtttatggtcccctgtacttgtcctccacatttatttgtttaacaaatatttaatggtttagtagcaaatgttttaggtgctggagatgctgcaatgctggcctcgttctggggagatgagcaaacacatagaacaactagggaaaggccacgcaaaccaaaacattggcctcgccagccttcagatatccctatgagagggttgctgcggaaggaagactgaagggaggagtttgttgaacgtcttgcctgcgactctcctgggccaggatctctgttaggacctgagagacacttgtgttgtgggcagaagtccctgccctcgtgggactggcagcctagcggccaaatagacaaagcacacagggagacatcttcacagtgaaaatgctgagacaaagagatagtgatcgggtggtaggagtatagacaaagtcatggagatgttagctgaatgacggaaaggtcgagtaaggggctggggaaggaccctctctgtagaggaaacaggaagtgcaaagggcctggggtaggaatgggcttggtatagtctaggagccaaaaagaaggcagctgtggctgacgcatgggttgtggggagagagagggaagaggtgatgctggagcagagcctgaaagaaatcagagttttctccaagggtactgggagccatggaagggttttaagctggggagttccttggtcagatctttctttgggaagatgcttctgggtgctctgaggcagaggggttgaggattcgtggtcaagagttgaagtctgaggccgggtgcagtggctcatacctgtaatcccagcactttgggaggctgaggtgggcggatcacctgaggtcaggagttcaagaccagtctggtcaacatggtgaaaccccgtctctacaaaaatataaaaattagccgggcatggtgccacatgcctgtaatcccagctactagggaggctgaggcgggagaatcgcttgaacccaggaggcggatgttgcagtgagccaagattgcgccattgcactccagcctgggcaacagagtgactttgtctcaaaaaaaaaaaaaaaagtgaagtctgggaacctagagggagacgcccaggagtccacgtggcggagaggtgggtatggaggcatctggaacgaagcccagagttctaggtgaggacacgtaagaggagctcatttggaggccagtttgggtgtggcatgcctaagatgtccaactgactggaggaggctgctgcatccagggctggagctcaggagaaaggcagaggcacaggtgtggagagtgaagcgtccctgccccaaccccaggtgtgccgcgtgctgcccctgagagccctgccccgcgctgtgaccccggagatgcgcgccctggtggtagactggctggtccaggtgcacgtaggtatctggaagggtgtggggggctgagtttgcgtcgccgcccaggaccccgtggtcacccttgcccctcctcaggagtacctgggtctggctggtgacacactttatctggcggttcacctgcttgattcctacctgagcgctggccgcgtgcgtctacatcgcctgcagctgctgggcgtggcttgcctgtttgtggcgtgcaaaatggaagagtgcgtgcttcccgaggtacttccggggtggggtttgggagggtggatggagtcctttggggagtaactgattcagtgactactgtgtgccaagcaccgtgctgagtctgggattcccaacatgtatgagggaggggctgtcaatgtgtcccttaaacagaagaggagaccgaggctcagagagaggaagacatttgccccaaatcaagcagttggaacttggactcagtctagaatagtctgtcttaaggctgggggtggtggctcacgcctgtaatctcagcaccttggaaggctgaaaccggcagatcacttgagatcaggagtttgagaccagcctgaccaacatggtgaaaccctgtctctactaaaaatataaaaattagccaggtgtggtggtgcacgcctgtaggcccagctactcaggaggctgaagtaggataattgcttgaacccaggaggcggaggttgctgtgaggtgagatcgcgctactgcactccaaaaaaacaaacaacaacaacaaaaaaaaacaaaacaaatcactttggggagccaaggtgacctcgtctctaatttagaaaagtaaataaaaataatataaactagtccatcttgaatagttaccgtcaacatgcatgaattcagtgccttatcagaactgcctggtgaagcagggagtagtatctgttttacggggggcggggggtagctgaggcagagagcttaagtgaatgtcctatgtcacacagtgagcagatgatggggtttgaactcgaacctaggtcttgaacccaggaccctcaagcccgtgctctctacgacttccagacacaagtcaatggccccattttacacaccaggaaactgaggtccggaacttggggcctttccagggcagggagtaaagagcccggatccaagactccttcacctccccccgcatcccccatctgcagcccgccttcctctgcctcctgagcgcggactccttctcacgggcggagctgctgcgcgccgagcgtcgcatcctgagccgcctggatttccggctgcaccaccccggcccgctgctgtgcctcgggctgctggccgcgctggcagggagcagcccccaggtgagcccttgtgaatacgcggggtgggggcgtggccggcgcgaagtggggcgtggcctgacagtcgccccgcctcacttgcaggtgatgttacttgccacctacttcctggagctgtctttgctggaggccgaggcggcgggatgggagccgggtcgtcgtgcggctgcggctctgagcctggcgcaccgcttgctcgacggggcgggctccaggctccagccagaactttacaggtgtagtcttggcggaggaagtgtatggggtcaccgcagcttcagggacttaccttcctggtcatttttacggtctcggagaatgagagacaattattgaggaggaggtggcacctagacttgatttttctgggtgtgggagagaatggggtgggaggaccccattagtccagatctggggtctcttaaccttgccccagagtggaagatagtctcccaggcccagaagatgctcctattgccttccagggctgagaacgaaggatcacccaggcctcgagtcctccatctctgtatctggtggtggatggggtgttcctttagctgctagggccgctaaccatgctaccaggtggcagggcgaaccatggtttccctcagcctgtgcacccagcatagagaggatggctgcccatcctcagctcccctccttgcttcctcgagtgttctgactccgcactagccgcgccctgtaggaagaatagggtgtccacctctccccggtgctcgcctagtcactccagttgaagacgggacgcgtgcccgatctcaagagagcccccgacccgtccgtggggaaccacatcgacgcttcttctcagcctccagtctccagttccaaggatgggtcatctccaaccccttgccctgcctcagtttctccatctccctgctgcagccccgaggaactgggcaccctcgagccgtgcatggcccgcgctgcgctccgaggtcccgcgccgggtcgcgccgcagtcttcctcaagtatgcgcggccccagcgccaggggaccagccttgccgccgcctgcctgctccgccgcctccagtctgagcctccctgagtactgggactcagtcacaaaaaaatcaacaacaaaaaacaaaaccctcccagtgtgtgtccgtctctcatctcaataaaagaatttattttattctgagcgctctctgccctcattggtcgaattccggtcccctctcgcttttgattggtcgctttctaggcctcgcatccctctaattggatgtgctcaccacttcctttaatggttgctgggagataaaatgcaaattctgaactcctccaccagggggcaatggcgggcttccccaagagtcattcagcgggataaaactgggatcccttaaggactggcaaaaaatcacaagagatggggactgtgggggagttgagaatgcccatcccggtcagaagaaatgctacctcgatgttgccggattttcagatcttattcaagtaaacctgagattctgcaattccatatctgcgtttagatgtcaactaattcagtctttctgtttttgttgttgttttagacggagtttcgttcttgttgcccaggctgctggagtgcaatggcgcggtctcggctcactgcaaactccgcctcccgggttcaaatgattctcttgcctcagcttcccaaatagctgggattacaggctcctgccaccacgcccggctaatttttgtatttttagtagagacatgtttcaccatgttggccaggctggtctcgaactcctaacctcaggtgatcctcccgcctcggcctcccaaagtgctgggattacaggcttgagccaccgtacccggcctaattcaatatttcttaatggttgtacaagcccaacacatcacatatactgggctatgaagataggttctcccaagcctggaagatgctctgcgaaggtcatcagtttgtagtagtaagtcctggatagtaagagttttatcaatggggtctgatatacttaacctgggaagtgcccaggtgtcagtggggataattatggtaccaacctcctgacactgtggtgaggatgtgagttaaaatatacgtaaagcagccaggtgcggtggctcaagtctataatcccagcactctgggagaccgaggcgggcggatcacgaggtcaggagtttgggaccggcctggtcaacatagtgaaaccccgtctctactaaaaatgcaacaaattagctgggtgtggtggcgggcttctataatccgagctactcaggaggctgatgcaagaaaatcgcttgaacccggaaggtggatgttgccgtgagccgaggtcacgtcattgcactccagccccggcgacagtgcaagactccatctcaaaataaataataaaaaataaataaaagggaaagctctttatgacaatgtctgacacctaggaggtgttgtaaaagtgttagcattgcatcccagcaggactgtgattttaggtacagttgtcctgtgctactgtgcctgggtacctaggcatttacttcgtcagaaaacatggttatgaatcaacggatctccttttttttttatttttttttttgagacagggtctcactctgtcatcattcaggttggagtgcagtggtgtgatctcagctcactgcaacttccacctcttgggttcaagcaatcctcccgcctcagccttccaagtggtgcacgccaccacccctggctaattttttgtatttttggtagagacaaggttttgccatgttgcccaggctggtctcgaactcctgaattcaggtgatccacttgccccggccttccaaagtcctgggattacaggtgtgagccactgcgcccagccagatctctgtgtttttcattacaaaacagacacaccggaggtagggaaaggtgtgtgcactgctcaagaactcaaactcatgagttttacactcctaactgagcctgggtttggagatgcagagaggaaaatgtttgcacccctgaggtgttcaaggctggaccccagggataagggagaaactcactcagca

SEQ ID NO: 415 - DNA, 2562 bp, Homo sapiens
atgaatgaggtgtctgtcatcaaagaaggctggctccacaagcgtggtgaatacatcaagacctggaggccacggtacttcctgctgaagagcgacggctccttcattgggtacaaggagaggcccgaggcccctgatcagactctaccccccttaaacaacttctccgtagcagaatgccagctgatgaagaccgagaggccgcgacccaacacctttgtcatacgctgcctgcagtggaccacagtcatcgagaggaccttccacgtggattctccagacgagagggaggagtggatgcgggccatccagatggtcgccaacagcctcaagcagcgggccccaggcgaggaccccatggactacaagtgtggctcccccagtgactcctccacgactgaggagatggaagtggcggtcagcaaggcacgggctaaagtgaccatgaatgacttcgactatctcaaactccttggcaagggaacctttggcaaagtcatcctggtgcgggagaaggccactggccgctactacgccatgaagatcctgcggaaggaagtcatcattgccaaggatgaagtcgctcacacagtcaccgagagccgggtcctccagaacaccaggcacccgttcctcactgcgctgaagtatgccttccagacccacgaccgcctgtgctttgtgatggagtatgccaacgggggtgagctgttcttccacctgtcccgggagcgtgtcttcacagaggagcgggcccggttttatggtgcagagattgtctcggctcttgagtacttgcactcgcgggacgtggtataccgcgacatcaagctggaaaacctcatgctggacaaagatggccacatcaagatcactgactttggcctctgcaaagagggcatcagtgacggggccaccatgaaaaccttctgtgggaccccggagtacctggcgcctgaggtgctggaggacaatgactatggccgggccgtggactggtgggggctgggtgtggtcatgtacgagatgatgtgcggccgcctgcccttctacaaccaggaccacgagcgcctcttcgagctcatcctcatggaagagatccgcttcccgcgcacgctcagccccgaggccaagtccctgcttgctgggctgcttaagaaggaccccaagcagaggcttggtggggggcccagcgatgccaaggaggtcatggagcacaggttcttcctcagcatcaactggcaggacgtggtccagaagaagctcctgccacccttcaaacctcaggtcacgtccgaggtcgacacaaggtacttcgatgatgaatttaccgcccagtccatcacaatcacaccccctgaccgctatgacagcctgggcttactggagctggaccagcggacccacttcccccagttctcctactcggccagcatccgcgaggccccacgttctgcagccttaaggttgaacatgagtgcacgtccatgtcagtgctgtgggactcctgtgcgtgcctcggactgcgtgtgtcggcgggacgcaggcacacgtggcccaaccactctgggctttgccttggtgatggagtcagacccctgggccccagctcctcctgtactagccgttcccttcagcaaggagggcactgagctcagggatggggtcccacagctgcagcagctggccccgtagttgagcatgtgtggttatcctgtagagcttttcccaagaagggtgtttgaacttagagtcttaataaaatcttaccaaataaattttgagtagaataatcgtcttttgcaatgtacattttaaaaatttcacacattcttttttgtatataaagaacagtgactgggcacagtggctcatgcctgtaatcccagcaatttgggaggccgaggcgggcgggtctcttgaggccaggggttcgagaccagcctgggcatcatagggagaccttcatctctacaaaaaatacaaaaattagctgggcatggtggtgcatgcctgcaatcccagctaacttggaaggctgaggtgaggtgggaagatcacttgagcccaggagtttgaggctgcagtgagctatgattgcggcactgcactgcagcctgggacaatgagactgtgtctctaaaaataaaaaaaaaaaaaacatgatacatgctattaaaaaagacagcaaagcaggagtataagaaaggaaattcacccgaggtcgcagggccttgagtactcattttggtgctgattacctctctgcaaatggacacggcatcataaattggtagtttcctgctctttttgtgtaatcttttccagttaatgtgaagcctctgggggctgccctcgtgcactgatggttgtgtggagtcgggggcggcagtgcgattcccttttagctgctgcatggggggaactcaggctttccagctgcttcctggggttccatggggtagacccctcaaccgcttcagctgccccgttaacaggaattgacttggtttcgtttggtgctaccagcagtcctgtaataaactagctatccatctgtac

SEQ ID NO: 416 - protein, 564 aa, Homo sapiens
MNEVSVIKEGWLHKRGEYIKTWRPRYFLLKSDGSFIGYKERPEAPDQTLPPLNNFSVAECQLMKTERPRPNTFVIRCLQWTTVIERTFHVDSPDEREEWMRAIQMVANSLKQRAPGEDPMDYKCGSPSDSSTTEEMEVAVSKARAKVTMNDFDYLKLLGKGTFGKVILVREKATGRYYAMKILRKEVIIAKDEVAHTVTESRVLQNTRHPFLTALKYAFQTHDRLCFVMEYANGGELFFHLSRERVFTEERARFYGAEIVSALEYLHSRDVVYRDIKLENLMLDKDGHIKITDFGLCKEGISDGATMKTFCGTPEYLAPEVLEDNDYGRAVDWWGLGVVMYEMMCGRLPFYNQDHERLFELILMEEIRFPRTLSPEAKSLLAGLLKKDPKQRLGGGPSDAKEVMEHRFFLSINWQDVVQKKLLPPFKPQVTSEVDTRYFDDEFTAQSITITPPDRYDSLGLLELDQRTHFPQFSYSASIREAPRSAALRLNMSARPCQCCGTPVRASDCVCRRDAGTRGPTTLGFALVMESDPWAPAPPVLAVPFSKEGTELRDGVPQLQQLAP

SEQ ID NO: 417 - DNA, 55906 bp, Mus musculus
  misc_feature (1)...(55906): n = A,T,C or G
ccaagtttaccctccgctcacactacgatggcatccgctccctggccttccaccacagccagtcagcactgcttactgcctctgaggatggcacactcaaactgtggaacctgcagaaggcagttacggccaagaagtaagggtgccaccctggagggtgcggggccttaggacctggggtcctagtgatgggattcctctttttcccacagaaatgctgcactggatgtggagccgattcatgctttccgagctcacaggtagggagatggctgagcctgttgtaagccctgcgacccagcagcatagatgggctgctgcttcttgctgccctggagacctggagcagtggaggcttgggcataccccttactcaggggccatgttggttcccattgtggtttcactgaggcccctagagcaaagatgccaaattcctcatggcatccttaagatatacctaggaaaggacactgactgatgggagggctaggtggctaaaggtgccttctactaagcttgacaacataagtttgatccccaggactcaggtgctaggaggagagaaccaactccagaagttgtcttctgacctccacatgcgcattgtgatatatgacaataaatacatttaaatgatatttaaaaatagctagaagagccaggcatggtggcatgtactttggatcccaatacttgggaggcagaggcaggcagatctctgtgagttcaaggccagcctagtctacagagtgagttccaggacagccagggctacacagagaaaccctgtcttgaaaaaacaaaaacaaaacaaaactaaaagctaggagaaatcctcaagctcccgtgagcaaggaaggcttgagccttagctgccttgcatcgcctctcccttgcaccctgcaggggcccggtgctggcagtcaccatgggcagcaacagcgagtactgttacagtggtggggctgatgccaggatccacagctggaagattcctgacctcaacatggacccatatgatggctatggtgaggacagaccctgccactccctcctcctgtcacagctctgggaagtagcactgtaagcttcctggtctgacttaaggttaagagagtgggcggagggagatgaggcgtaatggtgaggggagagttgggctgcatttgagggacagtgtgagctggcttttggggaagcagaggctagcctgggtcagggccagaatgggcttggtcaacttggtggactatgttggggatcagctaaggtcttattgtgggtcaggggtttgttagaaacagaggaggtgagctgagaagcattggggggaccataaatggcagggagttgaggccttgtcctttagccctttaagagttaagtggaggagctggagatggggatcagtaagtaggtggagtgaagctctgggtcccatcccagtaccacaggagctgggtggatcagaatgctaagttcattgttggttacatagggagtttgaggccatgaaatcatatctcaaaaacaaacaaaccagacaaacaaaaacaaaaaacaagacataaatctttaatcgcactcaggaggcagaagcaaacaatgctctgagttcaaggctagccttgtctacatactaagttctaggccagttagagctacatagtgtctcaaaaaaaaaaaaattgctgtttcatcttacaatggagcagtaatggcaggagggataaccgcaatcacaagttcaagaccagcttgattatgtattgggtttcaggcctgctgtgccacataacaatcaagctactgcccggacatagtgaatccctattgggaggaaaagtcttctccactccaagaaaaagttaaagaggaagtgataatcttagtgctcaggagtttgaggcagggggattttaatttaaggtccaggtcagcctgctcgacatagaaaagtcttgtctcaaaataacacactacataggaccagcaagatggcttagcaggtaaaggcacccctgatggtcagagtccagtccctagaacccacattagaaggagggaaccaacaccaacatgagttgtcatcttgccaccacttgggttctcacatacttgcgtgcgtgaacacacacacacacacacacacacacacgtgctgggcagcagccagcaggcgcaatggtgcacacctttaatcccaacacttgaaaggtagaggcagaaggatctctgagtttgaggccaacctggtctacagagtaccagagtggtcaggactacacagagcaaccttgtctctgtgcagaccagacacggggcagggcaggcgggagggatggacagatgagcaggtaagtgggcaggtagatggaggaataagagttaaataggaggaggctggagagatggctcagggagtaagagcactgactgctctcgaaggtcctgagttcaaatcccacatggtggctcacaaccatccgtaatgggatctgatgccctcttctggagtgtctgaagacagctacagtgtacttacatataataaataaataaatattttttattgttattaaaaaaagagttaattagtgggtaacactgtcttgggaacaccctcacccatgttcttggatgtttctcaccttcctgaggacctcattttatattaactcccgtgtttttgtttattctattttgaaacaaggtcttaaaactagtttttaagtctgtttttaagaagccttttacctggcaatggtagcacacacttttaattgaggccagcagcctggtctacaaagtatgttctaggacagagaaacctggtcttgaaaaaccaaacaaacagacaaaagtcttttactaggagaaatgaacaccacgtcctatccctcaccaagaagctatttacaattgacttctgtgaggaagggaaatgagctgcctctgagccagagtcactaggtctatcagtgacactccagggcaggcttcatgcctaggggtggctgacaactcagaacacactccatgttgttgggggaaattttatgtttctttcatttttggctctttctttctttctttcttcctttctttctttcttccttccttccttccttccttccttccttccttccttcctttatttttccttttctttttctttttttaaaatcttctgctttagttttagtcttttagagagaaggaacatgaagttgcttgggcagtaaggaggtgggaaaatctggggagagctggggagagaaagagtgtgctcacaatatagtttaagaaaaaattcttttaagtatttttttaaaactttttaaagttctttttctttttaagagagggtaagtacatttttaaaaaatgtcttataggctgcatgtagtaatgtacacctttaattccagcccttgaggcagaagacaagcagagctcagtgagccagaactgctgagttcttggtcagctggggctacacagaaagaaagagagagagagagagagagagagagagagagagagagagagagagagagagaaaggaagaaaggaaaagaaagaaagaaagaaagaaatgtctttattatagactccatctctgcttaagtaaaaaagttttttattttgttttgtttttttgtttgggttggcttcgttttttgagacagtttctccgtttagccccgtctgtcctggaactcattctgtagcccaggctgccttcaaactccacctgcctctgcctccctcccttaaaggtgtgtgctaccaccattggtaaccataaaagaataaaattaaataaaaaaattttaagtagttttttttaatgtgaagagatacccagagttccctcctactcagtgcccttgcctaacttgttggtgcttagtgagctctttttacatgtatctctgtgttacagatggtcgtgagtaaaagcaaatgctcttaccactgagccatttctccaaccccactcccacccctcttttaaaagataggatttcactgtgttgtctttatgtagacccaggttggccttaaactcatagagatcctcctgcctctgcctcctgagtgctgtttactcttgaacatggctttgtgctaaattggttatggcagaatacagagttgcatttcctgtcaaactaatgatcatttgggaaggtcaggcatcaatcctaagtggacttcaggtgtcagcaggacttgacccagaaccatgtgaacttaacagcgagagagaccacagaaggtcctttgaacagcagagcctgagaaagtagaagggaaagacattgcagggactaaaaggggagccgaggcagctttccttcgtgctccactggtcccctgagctgctgaccttggccctggagagacagtgaacatggaagcctcattttctaagctcttgagctgttcctgagccctagagtcagaggagcttgtgggcagtggcagccacccaggtcccagcaaagataaagcccttgggccaatcagtgtagctggtgtccctgacaatctatttcctcccggcctgcccagacccaagtgtgctgagccatgtcctggaaggccatggggatgctgtgtggggtctggccttcagtcccacctcccagcgcctagcatcctgctctgccgatggcaccgtccgcatctgggatcccagcagcagtggtccaagctgcctctgtaccttccccatggatggaggtgagttttgaccccagtgtctcacaagcaggatacagagcccaggactctggtggctcctgaggagggcaggaccagcgctctgagtagccttctctcttcccctgtactctcagaacatggaattcccacctcagtggccttcaccagcactgaacctgcccatgtcgtggcctcctttcgttctggtgataccgttctttatgacctggaagctggcagcgcccttctcacattggagtctcgagggagcagtggtaagggcccttagccaggcaggccagtaagactgggggctgagtgcccataggaccccagttcctcccgtggttctggggacctagccatcagtgagaagagaatgttaccatatgccacaagcaggaaggaagcaaggctcagtggtagccagctagcttgacacacagggctgggaggcacgttcccaactgcagaagtggcctgcccctcctgcctctgtccggccctgctttcccctcaggcctgcctctcccactcttcccactgaccctccaggcccagcacagatcaaccaggtggtgagtcacccaagccagcctctcaccatcactgcacacgacgacaggggcatccggttcctggacaatcgaacaggtgaggcccagccttaattgtcccctcgttgtgttttttgggggtacgggcagcatgggacagggacattcaagactaccaaactctggtgtctaccttagaggttttcagacttcccgctcccagcccctcagcttcccaaataaggctagtagttgtcggggactcccagccactctctatcctctctccaggtaaatctgtgcattccatggtggcccacctggatgcagtcacctgcctagctgtggacccaaatggcgtgttcttgatgtcaggaagtaagttgagcgcctcttgctgctccttcctcaggagggttggaggcaaagagaggggctacagccatgtcaggcaactctactcttgagtgtgctataagttcccacgtcggcctcattgactctccttgggagccctgcctggggggagagaggggttgctcttgtgttgtaggcatgtggtgatgggatcagagtttgagtacttgatccatctctgctttcagatacaggctcagcagccatctactctagaatgagtagatagggccttcaaactagtgtcagctgcagcgagggtgtgcacatgtgtttgtagatgtgcaggcagtggtagtggaggctgtggggaggctcgggtgaatcagcttgctctgcctgacgatgccatgtactgctggctgagcagccacgcccaggtctccttattccctacccgatggtattaggcccagtcctgatagcatcttaagatctgaggctctgctttctgggctgagtcctggagctgagctgacttgaggagcagagcctcaggccagtcaggccctctcctctcatgcccaacagaggcccagcctaggctgctctgctgctgtgtcgtccacctcagttcccacagccatcagtcctcactggctgcctgctgcctgtgccaggcccttagtggccatccctctgtctggaaggcttgaggttgtttatcacctggagctagtgtctgctgttttctttgttgttgttgttgttgttgttgttgttgtactggggatagaacccaggacagtgggctggccaagccaatacacatcaactaagccacaccctaccgcttccagctgctcttgcttggtgtccctgtaggctgagagctgcctgttgtgtgtagcattcctcccagagtcctcacatatacttgacagttagcaggatggtagacgcaatggggacagagagaatatccttaaggcagaggcacgggaggaagagagctgagctgcttctgccccagggactttccatgagggcaggtgagggttcaaaccccaggtctgggctgaaacaacctcctttgttccacgcctgcgcaggccacgactgttctctgcgtttatggagcctagacaacaagacatgtgtgcaggagatcacggcccaccgcaagaagcatgaggaggccatccatgcagtggcctgccatcccagcaaggcacttattgccagtgctggtgctgatgccctagccaaggtcttcgtatgatcccacctggcctcgccctggctgcacagtgtcagggagcggggccaggcagtggggctgaggtaaggatcagggccatttgtgttctagataggaatgcagacacccagtgtccttgccccagaagacacccctatacccaccccacctccatgatccacttgcctgtcagttgggttgtgccaaagcccacagtcctgtgggataaatgaggcttcccggagaagatagagggaggaattggagctagtgaggggcactgtcctaaccagctgccttgcctttgtctctccaggcagcccccagcctcaccttcagaggctctgagtcttggcctctttcatcttcctggagcctggtggtgctaaaggccctttccccaggagtcacccctcaaggatggcctctggggtttctgctcatgccccaaccccaactcctgacatagctgtcgtcctgagtttgacacagcccaggctgggtgtcctttgggatctgattttgaccaagatgaaagaagatgccaggctccctcctagagtgccaccctccctcattcatcagatgaagggctgtgcagagaggggtctcctggggccctcctatgtgggccccaggttgtccttttggacctcagtccattcctcttgcttcccaacactaaccaagcctctggggccaggccttcctgggaagggcctccactcctctggggcattgtcctagccacaggccctccttgagatgtagagagagggtggagtgggccctgtgcccctagttctctgtatatctgtataaaggaatgggattttaatggcacccaccccacgttatcactgtgtgatagtctgtcagtctcctccttgctccacactttggcctctatttatttcactctttatttgggtcccaccttatgccctcggttcccctttcaggttcctgttcataagccccttcctttttgccccaacttgtatgtgaaaaaaattgtctcaataaaccctttggagtaagataggttttccaggccatctgtcaaggggatggtggacagtaggggaaggccactccctctgccttggttgagtggagtctggagagagggatatatggtagattgggggtctgtggtcgactgggatggggaacgaggtgacatgtgtggggggggtggaaatggaagcacatggccacatctccatgatcctccccttcctgtccctcaacttgtgctcccccgcgcagtgagctagggagcagatgctgggatggagcagtgaacatttagttgaagaccccttgcctgctcaggggctgagaacaaaagcccctttcctgccccatgcccactcttggactggcagacagcaggaaggtaggcccaccagacccaggcagagggcaggatgtgcagagcagtacagagttccctccccttacccacgtttaatgtcggctggtgggagttaggccttcattgccacagtggggaaggactggagtcccatcatacagagcagggtatgagccactctgacattccaaacagcaggcacagcatgttccacaacccccgccttctagacctgccccagggtcacggggtaaagggggccgtgagtcccagaagcaggcagtcaaacatgctggggacatgcctgtctagaaggtacatgtaggcatgtggtttttaggggacactcattagccaggctgtgagctccacgtggccttgcctccccctgtccctctttgcaacttccccaggtggtagtttgggttttcactccagcctcagacttccttccccagcctctgcccccggatgtggtgacagccagcactgtacccacctcagctgcccccagcagcgctgaaccagtaagggggggcccttgtggacaagttgctgctctcttaaagctccagctacctggatgtgaaaactaattggtagccactgcctgactactggagtaaaagtcagaacggctcttgatggagttagagttgactacacagactcacaggctctcagttgatgttagctttttagatttcctgttattgcactactgtttatttcagagaagggtggaggtcaggacaacccacagtagctcagctggttctcctttgactatgtgagtgtacaggattgaactcaggccagtgagcttggcttcaaatgcctttccccacctggccatctcaccagccacatgttggatgattccgttaacacacccacccagacacccctggatgttttcagtgccttccctttcctctgcaaaatcaaaggcagccacatcaactcaactttagcagtgtccaggcaccacctgtatttcggcctcatgacagaaaaactaaggctcacagtggagaagtcacacagccagaaagatgtcggcacttggtctcacaggaggtctatcaagtggtggtgtcctttgtcatgccaccttggttggagggacaggctttgtaccctcaactctctggagagaaacctgaaattaagctctcttgtgcatcctaaggcctcctcgacttcccaccttatatactgggcttttgagctggggacgcgcgcttttgtgtgtgtgtgtgtgtgtgtgtgtgtgtgtgtgtgtgtgtgtgtgtgtgtgtgtgtgtgtgttgggggcaggttgagtagcagaaactgtaaagccaccggacttgacaacgatttccgaccctttccctgcggtgggcgccggatgcgtgccagtctgacagctcactccttcaatgacaaagcgcctgcccctctcgcgtgccgcggtgaactgcggcgaaaagtcaactttccaggctggactgtgcagaggaaacgctgacccttccgccctcctacccccagccaccaaattccccccaactccctggtgcggggtcccgccttccccttccgtcccagtaaggcccgccctgtgatgtcacggtgccctgctttgattggccagctgtgccatcgctcctgagacttccttctgggccgccgctgccgacttaaactttgaagggggaaaaatagagctacccgcgctgtgcgaccctcccttgtccccgacccgccccgccttcggtaacgctccctcctccgccgcccctgatccaactttcctccgactttcacgacctgtgagagtctcttctttcagccctggccctggcaacccctcctcatccccgagccagtcgggttcctacgatccactagatccctggtcagactcccgttttctacccccaaggcagagcatcttcaggcctgccctgactttggtcctgccgtcaaacccaccggatcctggcattccctctgctttgctctcagccttctttctccaggggccttggatcgcagtgtcttttgattccagggaccctgccctacccgactttctttcctggtttcttccaaccttccaatctctgggtacccttccccaaaccactgtttttctttctgaactctgctctcttgactcccggcgtgtgacccactagatgccttttctctcattgcccaggatcccgccatcctcgcgtctctcaacctgacagatttctctctcaaatgcctgcgttcttaccaccaccgcaagagagctctcggatctaggtcccagggtccttggtgagctttgggcggcagatctggatctggcccccatggccgccgccccctcccatcccgcaggactccccggctctccggggcccgggtctcctccgccccccggtggcttggatctccagtcgccgccacctctgctgcctcagatcccggctccgggttcgggggtctccttccatatccagatcggattgacccgagagttcgtgctgttgccggctgcctcagagttggctcatgtgaagcaactagcctgttctatcgtggaccagaaggtgagggcatagggggctctcatgataaaggaggaggctttggaggtggcctgagattgttgggaggccagagaggggcctaggtgacagacgaggaggggcactacaccctagtcgtgtcctcactccaccaccggtttcagagaggcccggataggggtggggtgcccagaggcctccccaaattgcctgtcgctgcttgttgttttctgcagcgagcagggaggaagggaggggcctaccaggtgtggagttgggaggaaggggcaagtgggagcagctgatcaggaagagctcttctgatgggcccatcctgggcctccggtctttggaaacagtagaaattgaagccatactggccatggtgatcgggtgacatgtgtgagtgggtgtgtggacaagctgccaggggcaagcaaggtctcggggtacaatccctatcctttcccaggcctgagatggggtgtgaaggagcaaggcactcctgtgtatctccttggcaccccccaaaatccctgcagacccctctccccgcctaatcaatgcccctcctgctgctcttagatttggctatccaggttcctcgccttgagtatcatggtcagaaggaaccaagtgggactagatgcccaaatcctaggaaaatttacaacccagctggtagagcacttgcctagcaagcaaccccccccccccgggtctatcccccaaccctaggaggtagagaggagcatgctttttcagtagttcaagtgcctggtggtgaatatacgagaagttctgagtcctgagtggttgaataatatgacagttacaggtggaactcagaatgtataatcttataatgggagcacattgggattcccaaacatccagacttaggcttttctcgggctcctggaaatagatccttcctctctagagaaacagcaggaacagggccacctcccattttttccagcagataaaaaactagttagaaaaaaagccagcctaggctacatatccaaaccctgttccaagtgggtgggaggtgggggtgttactagatcaagccaccatccggggcaaggcaatactgattttctacagatcatcaagggaagctgagcccaccagctctccaagtctatttagcccagccccctcccactcctaaatcagcctagccggcctgtgggaagcaggactggggctcctgtacattgcccctggagtgaaattctttgtattagggttcagatccccagcctccccttctcgggcccaacctagtttgttttctgctcttctaggggctcaggggctgttttgggccccttcttgcctgccttccttccctgtgccccacctgggcagtttcactttctgttcgacgctgtgtcatttcctgcccacttccaagctgggacccggacacctgggtctttggagccttggatgagaggaggcctccttacctcttagctatcttaagcactcccccaaaagtccctccaacaccccccccccctttttttcttgtttcattctgccccaatgctgggccaagagccaggtaacaggaacaatagattcaggaaggaagctggggtggagatgtggctgaaagaggagggggtgatcactcagtgtcccgccagctctggaaaattcgaaatgttcactctgctcccggagcctctaaacctcctttgcccctcagcccctcccctgccagtctcacccgccagactctggccagagcctccctccttagcacacctggggctcaggcatcctgctggctcaaactggggttgggaggggacaggcaggaagcggtgggctgtagggtctcagtttccgggggaaacaaccggccctgccctgagagggttccagtaggctgccgctgtcgcatcctgtatttagcttttccgttgccactccacccctcttctcttgcccctcagttcccagagtgtggcttctacggcctgtacgacaagatcctgctcttcaaacatgacccaacatcagccaacctcctgcagctggtgcgatcagctgcagatatccaggagggtgacctggtggaggtggttctgtcgggtgagaagtggccggcaccccgggggcggggccttgttggggggagggggcgggcctctgggagaggtgacataggatcagtctgatgggacttgcctgtgatcccaggcacagtttttaagtaccgcaagtttaagactagcttgggctaaaaagtgaaacatttgcgctggacaactggttcagtggttaaaaacacttgttgctgtttcagggcactggggttcagttctcagcacccacacagcagctcacaaactgtaactccagttccaagggatctgactccctcttctgaccaccacaggcacaggcatatgagccagcaaagggccatacacataaaaaagaaaaatcaatgcatctttaaaaggtgtgcctcatagaaaccttgggaggaagtagcttgcttgcttgcttatttgtttgtttgtttgtttaagataagatcttactgtgagccaggcatggagatccatgcctttaatcccagcactcgggaggcagaggcaggcggatttctgagttcgaggccagcctggtctacagagtgagtgccaggacagctagggctacacagagaaaccctgtcttggaaaaataaaataaaataaaataaaataaaataaaataaaataaaataaaataaaataaaataaaatataaaaaaattttactgtgtagctgtggatggcctggaactcacagagatcctcctgcctctgactttacactgagattagagatgtggaccctgacagtcagctagatagccctctccctttgtgatacccagcacattttttaaaaaaaagatttatttattatatacaagtacactatagctgacttcagacacactagaaaagggcattggatcccattacagatggtgtgagccaccatgtggtagctgggaattgaactcaggacctctggaagagcagtcagtgctcttaaccgctgagccatctctgtagcacttttcacatgctaggcaagcactgtccctaccggtgaactatacccttagccaccacaactgtttaacatttagtgtgtgcgtgtatgtgtgtgcatgcgtgcatgtaaatattaaaagacaacttgtgggacttgagccactaaatcgagcctgtgtattgaactcaggtcatcaattgtggcaaccttttaactgctgagctgacatactagccccaggaatattttattttattgattatttatttttgagacggtctcgctatgtagtcctgtccgtcctggaactcaatatgtagaccaagctggacttgaactcacagagatgctactgcctctgcctcctagtgctaggattaaaggcatgtgccaccactgcctggcattatgggctgtcttaatattgcaactgcaacaaaacaacaacacattctttacccatttaaaaactccccactaactcccactttatcaggaggcacataggtgctttgctcagtgggaagctggtgtgtgtgtgtgtgtgtgtgtgtgtgtgtgtgtgtgtgtgtgtgtgtgtgtgtgttttcgagacagagtttctctgtgagccccagctaccataagccaggcacccatcctcttggctcaagtgtatcctccctccttgctgcccacagcctcggccaccttcgaggatttccagatccgaccgcatgctctcactgtgcactcgtaccgcgctcccgccttctgtgaccactgcggggagatgctcttcggcctcgtgcgccagggcctcaagtgcgatggtgagagccaaaggggactgggcggagcctgggaaggtgcgacatggtaggcgaagctaggaaaggcatgcggggactgggttaaggtcaaggaatggagcttagaagtaagtgacagaagctctaagagaacttgggaggcggttggggttcaggtctgtgggcagagtcccccccggggggggggggcatggagctggtgggctaagttaggactccaggcaggcaaagtttgaggggccctggaatggatacagagcctaggaggtgattcttggtataagtgaggttcagggttcctggacagagcagagcccttttcagagttcaggtatgggacatagagcataggaagatagggcccttatgatggagatttatttagttttgtttatttttatgctttgtgcattggtgttttgcccgaatgtgtctgttggaccacaaatgttgcatgggggttaggaaccgaactcctgtcctgtacaaaagacaagtgctttaactgctgagccatctctagggagatcttgaggtgtggtgatggaaatgagctccgtgtcaatcagagatgaagcaaagaaacagaacagaaggagaaaaatagcaacagtttatctggaggagttggccaggcagctccagaatcctcagggcaggcagcctgttggggatctcaggtgcaagttgcctgaccacaggcagaattccaccgtctgagaatcatctgggaatctcggctctttaaagcttccggtttagtgaaaactcaggatagaatcacaagatacagactcaaatccagtgcacaaatttccttcagcggcagcaccgaatcttggggtgctacatccacttttgctgatgtggatgcttgaagcgggggtgggggggtgggggggtgttcttaagacgggagtgggggtgggggggtggggaacaccctaatagtggctgcaggctttggcgctgatggtcttgcgccccctataggctgcgggctgaattaccacaaacgctgcgccttcagcatcccgaacaactgcagtggtgctcgaaagcgccgcctgtcatccacgtctctggccagtggccattctgtgcgccttggcagctccgagtccttaccctgcaccgccgaagagctggtgaggggctggagagtggggaggggtggaggctgagggctaatggcaccaggcaggtgctaattcgctgatctgttccttctgccttccctgctgggtagagccgtagcaccaccgacctccttcctcgccgaccaccctcgtcgtcgtcctcctcctcttcctcttccttctacacaggccgacccattgagttggacaagatgctgatgtccaaggtcaaggtgccacacaccttccttatacatagctacacacggcccaccgtttgccaggcttgcaagaaactgctcaagggtctattccgccagggcctgcagtgcaaaggttagtggaacacactgggaagactgtgggtctaaaactccccccagaggaaaacgcaggatctccgatccatggcctgaatcccggccattatggaagtttctggagttctggaaccctatacccttggaaatctagatctgtagaacacaatataatcccactagaaagaccaagaatctgacttaggagtgtaagagtcaagacttctggaattgtctgaagttacacacaaataatcccacccttcatttgagatactaaggcagggcgatcaggaatttaagactagcctccgccgggcagtggtggcacacaccttcaatcccggcacttgggaggcagaggcaggaggatttctgagtttgtggccatcctggtgtacagagtgagttccaggacagccagggctatacagagaaaccttgtctcaaaaaaacaaaacaaaaaacaaaacaaaacaaaaaacaaaaaaaaaaagtttgacctggtgggccatgcctgtaaaactggcactgggagttggagggggagggatcatccttggctacataggttctgggccaggctgaactacctgcgaccctgtctgaagcaacaaagaaaccaagtgaacaagccatcctttattgtcttacccatggggtcatctcctcaacttttagagtgcacatttaatcttagcactgttgaggctgaggcaggaggattgccaggaattagatgctggccaatctaggctccatagtgaggccaagtcctagatgcacatagtaactctcctgtcctgcccatccctctgtcccctgtcccttcagactgcaagtttaactgtcacaaacgctgtgctacccgcgtccctaacgactgcctgggggaggcgctcatcaatggaggtgaggtaattagcatctaagagggatgagggactggggatgggaccagggagggatggatggaggcccttctgacgccctgttcccgcagacgtgccgatggaggaagccgctgattacagtgaggctgataagagctccatctcagatgagttggaggattctggtgtcatccccggctcccactcagagagtgctctccatgccagtgaggaagaggaaggcgagggacacaaggcccagaggtactgtgcccaggggcccttcagaaggctgcaagcctgggcttccctgtctttaagatgggctaatatcagtgtatgattgtaaatgttctagattcctgagccccaactttttttatctttgggtcctctctctcttgcttctcttctgtttaaaacaaaaaaaaaaaaaaggtgtatgtgagctgagcaggcctttagtcccagcacttgggaggcagaagcaggcaggtttctgagttcaaagccagcctggtcttagagtgagttccaggacagccagggctacacagaaagaccatgggctttgtggggcaggggtgatgtatggatgcttttgtgtgtgtattcagctgtgtactgcatgtgtgcactttccatggagaccataagagggtgccaggtaccttggaactggagccatagacagttgtgagccttcacgtgggtgaaggaaaccaaacccaggttctcgggaagagccgtccgtgcttttaacaactgagcagtctctccagtgctgtttttgttgttgttgctttctttctttctgaagcttagtttcatataacctacactggcctcaacctgagtgtgaacttctgatcctcttggctcttcctcccagtgacttagattgcaaggttgaaccgccatgcccagtttatgtggtgctggggtcaaactccattcgtaccaggcaagcactgtaccactgagctacatccctagcctctccctgaccctcttttgggctttctcttttcttttcttttcttctcttctcttctcttctcttctcttctcttctcttctcttcctctctcctctctcctctctcctctctcctctcctcctctctacctcctcatctcctctctcctctctcctctctcctctctcctctctccatctctcctctctcctctctcctctctcctctctccatctctcctctctcctctctcctctctcctctctcctctctcctctccccnnnnnnnnnnnnnnnnnnnnnnnnnnnnnnnnnnnnnnnnnnnnnnnnnnnnnnnnnnnnnnnnnnnnnnnnnnnnnnnnnnnnnnnnnnnnnnnnnnnnnnnnnnnnnnnnnnnnnnnnnnnnnnnnnnnnnnnnnnnnnnnnnnnnnnnnnnnnnnnnnnnnnnnnnnnnnnnnnnnnnnnnnnnnnnnnnnnnnnnnnnnnnnnnnnnnnnnnnnnnnnnnnnnnnnnnnnnnnnnnnnnnnnnnnnnnnnnnnnnnnnnnnnnnnnnnnnnnnnnnnnnnnnnnnnnnnnnnnnnnnnnnnnnnnnnnnnnnnnnnnnnnnnnnnnnnnnnnnnnnnnnnnnnnnnnnnnnnnnnnnnnnnnnnnnnnnnnnnnnnnnnnnnnnnnnnnnnnnnnnnnnnnnnnnnnnnnnnnnnnnnnnnnnnnnnnnnnnnnnnnnnnnnnnnnnnnnnnnnnnnnnnnnnnnnnnnnnnnnnnnnnnnnnnnnnnnnnnnnnnnnnnnnnnnnnnnnnnnnnnnnnnnnnnnnnnnnnnnnnnnnnnnnnnnnnnnnnnnnnnnnnnnnnnnnnnnnnnnnnnnnnnnnnnnnnnnnnnnnnnnnnnnnnnnnnnnnnnnnnnnnnnnnnnnnnnnnnnnnnnnnnnnnnnnnnnnnnnnnnnnnnnnnnnnnnnnnnnnnnnnnnnnnnnnnnnnnnnnnnnnnnnnnnnnnnnnnnnnnnnnnnnnnnnnnnnnnnnnnnnnnnnnnnnnnnnnnnnnnnnnnnnnnnnnnnnnnnnnnnnnnnnnnnnnnnnnnnnnnnnnnnnnnnnnnnnnnnnnnnnnnnnnnnnnnnnnnnnnnnnnnnnnnnnnnnnnnnnnnnnnnnnnnnnnnnnnnnnnnnnnnnnnnnnnnnnnnnnnnnnnnnnnnnnnnnnnnnnnnnnnnnnnnnnnnnnnnnnnnnnnnnnnnnnnnnnnnnnnnnnnnnnnnnnnnnnnnnnnnnnnnnnnnnnnnnnnnnnnnnnnnnnnnnnnnnnnnnnnnnnnnnnnnnnnnnnnnnnnnnnnnnnnnnnnnnnnnnnnnnnnnnnnnnnnnnnnnnnnnnnnnnnnnnnnnnnnnnnnnnnnnnnnnnnnnnnnnnnnnnnnnnnnnnnnnnnnnnnnnnnttttgtttgtttgtttgtttgtttttaagacagtctttttctatgtagcccaggttatcctggaacttgctctgtagtccaggctggcctcgaactcagagattcactttctgagtattgggactaaaagcatgaactcctatgcccaactaaaataaataatttttttaaagatttatttatttatttaatgtatgtatgtacaccgtccctgtcttcagacacaccagaagagggcgtcagatctcattattacagatggttgtgagccaccatgttgttgctgggaattgaactcaagacctctgaagagaagtcagtgctcttaaccattgagccatctctccagctcataaacaaatctttaaaaaaaaaaaaaaagaaaaaaaaaaagtggagccaggttatcaagatggctccaaaggtaaagatgtttcccgagaaagctgacctgagtttgatccctatagccacataaaggtggatggagagaactgacttcgcagagttgccgtcctccacattccagaggtggaacagaacccacagaacccaccaccccctacacacgcccacacgcatgtgcgtgtgctccatattcacacaaacactcaaaacaatatcttccttgctacgaaagtctgtaaactcagtgggaaaagaagcagcgttctcacgtgactgctcaaagccgtccctgtggccccaggcaggatatcagttttgcatgtgacctgtaacatctcacccattccctgcagctcgctgggatacatccccctgatgcgcgtggtacagtctgtgcgacacacgacccggaaatccagcaccaccctgcgggagggctgggtggtccattacagcaacaaggacacactggtgagtctgagggatgcctgtgtagatggacagggctagttccgggtgggtggtgacaagtgggcggggttagacctctgggtgggctggaagaacttgagttggcatggacccataagtctgggtgggcggggccagagttatgggtggcccaggaaagtgggcagctgaggccagttgggtgtgactagatttaaaggtctgcctaaaaaacttgagcagacggagtgctcagtggccagatgggcgaggtctaggtaggcggggatagagaagggagggccgggaaagtccaggtatcttaggtctaaggagctggggttctgtaggcagtgatagaatagagggtgtgttaagtggaaggggactgggcaggatgtacagcccggcgggttgagggtggggcggctgcggagtgaggccaagaagagccacagccagctagggaaggagctaggggggcggctgcggggtgaggccaagaagtgccacagccagctagggaaggagctaggctgggttttgcttttgcaaaccacctggctgtcagcctcaccctgtccctctctttctaacagaggaaacggcactactggcgtctagactgtaaatgcattaccctcttccagaacaacacgaccaacagatactacaaggtgggcctccctctctcctcctcttcccccttctccgatggccaccccaaatccttacagctccctcaatctcccaccctgctgtctccctgctgctagccattaggccagtaccgcccactggtcaacctccgtgctttccagtcaggggagcaggcaggtgccgtagcctctccctgtccctttatctcacctgtaaaaaaggcctcaaatactagctctgccctaaggccggtgtgagagctcagaaatcatccgtagaaagcaaagagctcaaggcctgatgtgtacaaggctcccaatgatgtaactgcactggcctggagctcacagatctgccgacctctgactcttgagtgctgggattaaaggcacgtgccaccatgcccagcaagcctgttattactttcaaattaataggtggcctatagctagtcttttctgcgacttccccgtggggtaatgtcttaccctcactgtttctggttctctacggaagtctatgtaagtgtgactttgcttctctctggagcccggaagtccttacttaaaactctaagtcagccagatgtgattacatgcatctattgtcacggcagtccgggaggtatagttcaaggccagcctgggctacgtgagccctgtctccagagtaaaatacacacatacataaagtcatcagagctccagtgactccattaatctgggaaatagagatcaggttccccagccaccaccatgtcttccttgacgtgcccgggcctgcttctttcttacctttccatatctgtctcaccacagagcttgttgcataagtcactttttcaaaccctggggccaacttaggcctggaaagtactctaccactgagccacgcccccagcccctcactgggggattctaggcaggggctgtaccactgagccacacccccagcccctcactgggggattctaggcaggggctctaccactgagccacgcccccagcccctcactgggggattctaggcaggggctgtaccactgagccacacccccagcccctcactgggggattctaggcaggggctgtaccactgagccatgcccccagcccctccctgggggattctaggctataaagccatcccacccctctttctacttttttttttttgaaggattgtctcaccaagttgcttaggccagccttgaacttatgatccttctgctgcagctttccctgtgtactttgcctgccccatagtcccaaacttcctcttccacagcctcctttatgtctactgctttgatctaattctgtctcgtggactttccacacagtgccatgaacttgaacctccttgttctaagcctttccatggctccctagggcccgcacacaaattccagccttttttgtgtggcccctgatgtccttcatttatcaagtgccttcagtgtgccaggcgctgtcccatgtgatgggcacagcagccttcttctgtgctgctccatagtctcctggctagctaactgctctcatggttagcatgggtacggctgggaggcctttccccacctgtccacgtagaccaggtctgtccttattgactctgagaacaggggagctgcagggatggcccaataggtttgcctacactgacagttccaccccttgccaggaaatcccgctgtctgaaatccttgcggtggaaccggctcagaacttcagcctcgtacccccgggcaccaacccacactgcttcgagatcatcacggccaatgtcacctactttgtgggcgaaacccctggcggggccccgggagggccaagtggacagggaacagaggccgttcggggttgggagacagccatccgccaggcactgatgcccgttatcctccaagatgcgcccagtgccccggggcacacaccgcacagtaagtccctacctgggttgctagaggtggtactaaagaggctgaaagacatcctggataaggaacaagcctggaggaaggcaggctgccttctttctacggcactgaggatagcgggtaaaatgccaggcatagaatcgtgaggtcccatatggagcctctggtacaactggtcagctccgtagtggttcttgtattccatttcccagacgacgaaactaaggttccaagtgtagcctttggaggcacaggtgacacctgtgctgagcccagagctcgctcacttctctcttcccctcttcctaggacaagcgtctctgagtatctccgtgtccaacagtcagatccaagagaatgtggtaagtcagtcggcgcaggacccccttcctcctgacttggtgggctgcacagatggctcggcagttaagagcacttgccctgaagaagatctgagttgaattcctagcactcgtattaggtggctctcaaccccctgtaactccagactgaggaacccacccaggttgcagtgaatcactgcaggtgactcgggtggcaggaccttgaagcagctggccacatctgcagtcgatagcagagaggaaagcttgtgtgtctgttcagctcacttgctcctcttctgtacagaccaggacccagagccagggaatggtgccacttactggcagcctgggtctttccacatccattacaagacaacctctcccaggccagcctgatccggaccatccctcagccaacaaaactatcacacctgtctcccattcagcgtggaacctcccagtctccagtctccttgaccctcttttttttccaatttgcaccatgaccttgctgtctccgcttcacaggatatcgccactgtctaccagatcttcccagatgaggtgctgggctctgggcagtttggagtggtttatggaggtaagggtgccgcaggcctgactcagaggctgccccaggtcaggggatatcatcccctccttgctgcccgtctcctgggttgtttgatgcagacacttgcaggctccttttcccatcaggaaaaccagtgggcttcttgactgttatcaataggagatgtacattctggcttccgattggttaggagtatagttgtcgatgttatccattgcccttcttgaagctctctctatagctttaatttgcggcacaaggtgccctcaagcttgtgatcctcatgccctggccttccaaatgctgggataatgggattgcatcactattccaggcttgtttggttttcttctttctttttctaggggtgaaagcaatggcagtctgcatgctaggcaggggctctaccactgagccacgcctccaacccctcactgggggattctaggcaggggctctcccactgagccatgcccccagcccctcactgggggattctaggcaggggctctaccactgagccacaccccagcccctcactgggggattctaggcaggggctctannnnnnnnnnnnnnnnnnnnnnnnnnnnnnnnnnnnnnnnnnnnnnnnnnnnnnnnnnnnnnnnnnnnnnnnnnnnnnnnnnnnnnnnnntgcccccagccccttactgggggattctaggcaggggctctaccattgagccacaccccagcccctcactgggggattctaggcaggggctctaccactgagccacgcccccagcccctcactgggggattctaggcaggggctctaccactgagccactcccccccagtcccctcactgggggattctaggcaggggctctaccactgagccacgccccccagcccctcactgggggattctaggcaggggctctaccactgagccactcctctggcttctcttctcccacttttattccctagccctgctatcccacccctcatgttgagaactcttcagagaaaccttgaaggcctacaatatttttgctcaattccatgtgggtctccatagaggagaaggaactaggtcttcttgatcgctgaccctttatctttcctgtgctcgccctcaggaaaacacaggaagactggcagagacgttgcagtaaaggtcattgacaaactgcgcttccccaccaagcaggagagccagctcaggaatgaagtggccattctccaggtgacccgaagggaccgtgactcagccgtacccctgcttactccttttaagtacaacatgggctacagtctaggggtgatcaagttagtctttctggaagagaagatagatacatatcctggaactgtggggtattctgagcagagagggacaaggaccagtctgtgcaggtgacagggaaccccggagccatggaagaaacggggccagggaggagggtggtaagacactcagtggtctttcttctaaaggtatctagagtgccagaggaagatcttgtgggctagggcatcagcttgcctagcacgcgcaagcaccagaagaaaagcaatcaaatagaaaccaaagctacacacatacagtgcaagcttgctgttatcccacgcttcctgctatctctttctgccaccccggccttccccattagttcacaactcacaacgcagcaaagacctctccaggcgcttgccgcctctcgccatactgatcctcagtcctgatccctcttcccccattcccggacagagtctacggcaccccgggattgtgaacctcgagtgcatgtttgagactcctgagaaggtattcgtggtgatggagaaactgcacggggacatgttggagatgatcctctccagcgagaagggccggcttcctgagcgtctcaccaagttccttatcacgcaggtgcgctgtgcgccgtgacttccggctccccctggcggaggcgtggagaaaaggctggtgccctaggcactcaagagggcaaattagagaaatagatggaagtctcattaataacattaaaaaataaacaataggccgagcgtggaggcgccagcctttaatcccagcacttgggaggcagaggcaggcagatttctgagtttgaggccagtctggtgtacaaannnnnnnnnnnnnnnnnnnnnnnnnnnnnnnnnnnnnnnnnnnnnnnnnnnnnnnnnnnnnnnnnnnnnnnnnnnnnnnnnnnnnnnnnnnnnnnnnnnnnnnnnnnnnnnnnnnnnnnnnnnnnnnnnnnnnnnnnnnnnnnnnnnnnnnnnnnnnnnnnnnnnnnnnnnnnnnnnnnnnnnnnnnnnnnnnnnnnnnnnnnnnnnnnnnnnnnnnnnnnnnnnnnnnnnnnnnnnnnnnnnnnnnnnnnnnnnnnnnnnnnnnnnnnnnnnnnnnnnnnnnnnnnnnnnnnnnnnnnnnnnnnnnnnnnnnnnnnnnnnnnnnnnnnnnnnnnnnnnnnnnnnnnnnnnnnnnnnnnnnnnnnnnnnnnnnnnnnnnnnnnnnnnnnnnnnnnnnnnnnnnnnnnnnnnnnnnnnnnnnnnnnnnnnnnnnnnnnnnnnnnnnnnnnnnnnnnnnnnnnnnnnnnnnnnnnnnnnnnnnnnnnnnnnnnnnnnnnnnnnnnnnnnnnnnnnnnnnnnnnnnnnnnnnnnnnnnnnnnnnnnnnnnnnnnnnnnnnnnnnnnnnnnnnnnnnnnnnnnnnnnnnnnnnnnnnnnnnnnnnnnnnnnnnnnnnnnnnnnnnnnnnnnnnnnnnnnnnnnnnnnnnnnnnnnnnnnnnnnnnnnnnnnnnnnnnnnnnnnnnnnnnnnnnnnnnnnnnnnnnnnnnnnnnnnnnnnnnnnnnnnnnnnnnnnnnnnnnnnnnnnnnnnnnnnnnnnnnnnnnnnnnnnnnnnnnnnnnnnnnnnnnnnnnnnnnnnnnnnnnnnnnnnnnnnnnnnnnnnnnnnnnnnnnnnnnnnnnnnnnnnnnnnnnnnnnnnnnnnnnnnnnnnnnnnnnnnnnnnnnnnnnnnnnnnnnnnnnnnnnnnnnnnnnnnnnnnnnnnnnnnnnnnnnnnnnnnnnnnnnnnnnnnnnnnnnnnnnnnnnnnnnnnnnnnnnnnnnnnnnnnnnnnnnnnnnnnnnnnnnnnnnnnnnnnnnnnnnnnnnnnnnnnnnnnnnnnnnnnnnnnnnnnnnnnnnnnnnnnnnnnnnnnnnnnnnnnnnnnnnnnnnnnnnnnnnnnnnnnnnnnnnnnnnnnnnnnnnnnnnnnnnnnnnnnnnnnnnnnnnnnnnnnnnnnnnnnnnnnnnnnnnnnnnnnnnnnnnnnnnnnnnnnnnnnnnnnnnnnnnnnnnnnnnnnnnnnnnnnnnnnnnnnnnnnnnnnnnnnnnnnnnnnnnnnnnnnnnnnnnnnnnnnnnnnnnnnnnnnnnnnnnnnnnnnnnnnnnnnnnnnnnnnnnnnnnnnnnnnnnnnnnnnnnnnnnnnnnnnnnnnnnnnnnnnnnnnnnnnnnnnnnnnnnnnnnnnnnnnnnnnnnnnnnnnnnnnnnnnnnnnnnnnnnnnnnnnnnnnnnnnnnnnnnnnnnnnnnnnnnnnnnnnnnnnnnnnnnnnnnnnnnnnnnnnnnnnnnnnnnnnnnnnnnnnnnnnnnnnnnnnnnnnnnnnnnnnnnnnnnnnnnnnnnnnnnnnnnnnnnnnnnnnnnnnnnnnnnnnnnnnnnnnnnnnnnnnnnnnnnnnnnnnnnnnnnnnnnnnnnnnnnnnnnnnnnnnnnnnnnnnnnnnnnnnnnnnnnnnnnnnnnnnnnnnnnnnnnnnnnnnnnnnnnnnnnnnnnnnnnnnnnnnnnnnnnnnnnnnnnnnnnnnnnnnnnnnnnnnnnnnnnnnnnnnnnnnnnnnnnnnnnnnnnnnnnnnnnnnnnnnnnnnnnnnnnnnnnnnnnnnnnnnnnnnnnnnnnnnnnnnnnnnnnnnnnnnnnnnnnnnnnnnnnnnnnnnnnnnnnnnnnnnnnnnnnnnnnnnnnnnnnnnnnnnnnnnnnnnnnnnnnnnnnnnnnnnnnnnnnnnnnnnnnnnnnnnnnnnnnnnnnnnnnnnnnnnnnnnnnnnnnnnnnnnnnnnnnnnnnnnnnnnnnnnnnnnnnnnnnnnnnnnnnnnnnnnnnnnnnnnnnnnnnnnnnnnnnnnnnnnnnnnnnnnnnnnnnnnnnnnnnnnnnnnnnnnnnnnnnnnnnnnnnnnnnnnnnnnnnnnnnnnnnnnnnnnnnnnnnnnnnnnnnnnnnnnnnnnnnnnnnnnnnnnnnnnnnnnnnnnnnnnnnnnnnnnnnnnnnnnnnnnnnnnnnnnnnnnnnnnnnnnnnnnnnnnnnnnnnnnnnnnnnnnnnnnnnnnnnnnnnnnnnnnnnnnnnnnnnnnnnnnnnnnnnnnnnnnnnnnnnnnnnnnnnnnnnnnnnnnnnnnnnnnnnnnnnnnnnnnnnnnnnnnnnnnnnnnnnnnnnnnnnnnnnnnnnnnnnnnnnnnnnnnnnnnnnnnnnnnnnnnnnnnnnnnnnnnnnnnnnnnnnnnnnnnnnnnnnnnnnnnnnnnnnnnnnnnnnnnnnnnnnnnnnnnnnnnnnnnnnnnnnnnnnnnnnnnnnnnnnnnnnnnnnnnnnnnnnnnnnnnnnnnnnnnnnnnnnnnnnnnnnnnnnnnnnnnnnnnnnnnnnnnnnnnnnnnnnnnnnnnnnnnnnnnnnnnnnnnnnnnnnnnnnnnnnnnnnnnnnnnnnnnnnnnnnnnnnnnnnnnnnnnnnnnnnnnnnnnnnnnnnnnnnnnnnnnnnnnnnnnnnnnnnnnnnnnnnnnnnnnnnnnnnnnnnnnnnnnnnnnnnnnnnnnnnnnnnnnnnnnnnnnnnnnnnnnnnnnnnnnnnnnnnnnnnnnnnnnnnnnnnnnnnnnnnnnnnnnnnnnnnnnnnnnnnnnnnnnnnnnnnnnnnnnnnnnnnnnnnnnnnnnnnnnnnnnnnnnnnnnnnnnnnnnnnnnnnnnnnnnnnnnnnnnnnnnnnnnnnnnnnnnnnnnnnnnnnnnnnnnnnnnnnnnnnnnnnnnnnnnnnnnnnnnnnnnnnnnnnnnnnnnnnnnnnnnnnnnnnnnnnnnnnnnnnnnnnnnnnnnnnnnnnnnnnnnnnnnnnnnnnnnnnnnnnnnnnnnnnnnnnnnnnnnnnnnnnnnnnnnnnnnnnnnnnnnnnnnnnnnnnnnnnnnnnnnnnnnnnnnnnnnnnnnnnnnnnnnnnnnnnnnnnnnnnnnnnnnnnnnnnnnnnnnnnnnnnnnnnnnnnnnnnnnnnnnnnnnnnnnnnnnnnnnnnnnnnnnnnnnnnnnnnnnnnnnnnnnnnnnnnnnnnnnnnnnnnnnnnnnnnnnnnnnnnnnnnnnnnnnnnnnnnnnnnnnnnnnnnnnnnnnnnnnnnnnnnnnnnnnnnnnnnnnnnnnnnnnnnnnnnnnnnnnnnnnnnnnnnnnnnnnnnnnnnnnnnnnnnnnnnnnnnnnnnnnnnnnnnnnnnnnnnnnnnnnnnnnnnnnnnnnnnnnnnnnnnnnnnnnnnnnnnnnnnnnnnnnnnnnnnnnnnnnnnnnnnnnnnnnnnnnnnnnnnnnnnnnnnnnnnnnnnnnnnnnnnnnnnnnnnnnnnnnnnnnnnnnnnnnnnnnnnnnnnnnnnnnnnnnnnnnnnnnnnnnnnnnnnnnnnnnnnnnnnnnnnnnnnnnnnnnnnnnnnnnnnnnnnnnnnnnnnnnnnnnnnnnnnnnnnnnnnnnnnnnnnnnnnnnnnnnnnnnnnnnnnnnnnnnnnnnnnnnnnnnnnnnnnnnnnnnnnnnnnnnnnnnnnnnnnnnnnnnnnnnnnnnnnnnnnnnnnnnnnnnnnnnnnnnnnnnnnnnnnnnnnnnnnnnnnnnnnnnnnnnnnnnnnnnnnnnnnnnnnnnnnnnnnnnnnnnnnnnnnnnnnnnnnnnnnnnnnnnnnnnnnnnnnnnnnnnnnnnnnnnnnnnnnnnnnnnnnnnnnncagagaatgtgttactggcatcagccgatccgtttcctcaggttcgttatgtcccctcctagacaaggacaagtcccaacagaaggggggtggagagtgactaatggtctagatgcaggtgagcttcacacccttggtgacccagcttcataagacaagggcttgatctctcacccagacacattctggggctacaaagttactacatactgggcaccctcttccctgctgttacatttaagatagttttgttgtgtcactggctttagtggtccatagtctagctaaacaaaggaaaaaagacaagaggtacaagaaatatatgcatccctttccttcgctgaggtagtagggatagtggtccacatcacttctctcacatctcattggtttgtctcaccttccagggatggaacctagggccctgcttatgtactttaccactgagccacgcccccagcccctcactgggggattctaggcaggggctctaccattgagccacgcccccagcccctcactgggggattctaggcaggggctctaccattgagccacaccaccagcccctcactgggggattctaggcagggctctactactgagccacgcccccagcccctcactgggggattctacacacgtactctaccattaagcttttaattcttatttgtggcaaagtcgcaatagttctttgttggaacctatctcatgctcaagttttctttacttttcttaatctgtatttgttctgcattaaaaactaaataaatctgccaagcacatgcatttaatcccagcattcgggaggcagaggcaggcggatctctgtgagtttgaggccagcccagtctacagagagagttctaagacaaccagggctacacagagaaaccctgtatcaaaaacaaaagaaaataaagctaactaacagatagatagatagatagatagatagatagatagatagatagatagatagatagatagatagatagagtcactcaggctaaccttgaactgtctattgtctgggctagccttgtatttgtgatcctagctcagcctccccagtactgagatcaaatacctgcaccagccctgcatacctggtcctctttaatccccagaaagtcttagacgttaacccatccccagtgtggtggaatcaaggtccttgttgaaaatcttgggcccattctgactgggcagacttctagaatgttgactatgttccccttccagtccataatcctcctgccctgtagggaccattaacaaagggcgaggtgcagactgtaacccaacccaggaggcagacagttggctatagagagcatttaatagagacgtcttcataccgggcccagtccaggaactacatgcggattaattcacatcatcctcatcacagccctttgagacaggtgttagagatggggaaactgaggtacagagaggggaagccactcacnnnnnnnnnnnnnnnnnnnnttcccagatgaggtgctgggctctgggcagtttggagtggtttatggaggtaagggtgccgcaggcctgactcagaggctgccccaggtcaggggatatcatcccctccttgctgcccgtctcctgggttgtttgatgcagacacttgcaggctccttttcccatcaggaaaaccagtgggcttcttgactgttatcaataggagatgtacattctggcttccgattggttaggagtatagttgtcgatgttatccattgcccttcttgaagctctctctatagctttaatttgcggcacaaggtgccctcaagcttgtgatcctcatgccctggccttccaaatgctgggataatgggattgcatcactattccaggcttgtttggttttcttctttctttttctaggggtgaaagcaatggcagtctgcatgctaggcaggggctctaccactgagccacgcctccaacccctcactgggggattctaggcaggggctctcccactgagccacgcccccagcccttcactgggggattctaggcaggggctctaccactgagccacaccccagcccctcactgggggattctaggcaggggctctaccactgagccacgcccccagcccctcactggggggtctaggcaggggctgtaccactgagccacgcccccagcccctcactgggggattctaggcaggggctctaccactgagccatgcctctggcttctcttccacttttattccctatcccacccctcatgttgagaactcttcagagaaaccttgaaggcctacaatatttttgctcaattccatgtgggtctccatagaggagaaggaactaggtcttcttgatcgctgaccctttatctttcctgtgcccgccctcaggaaaacacaggaagactggcagagacgttgcagtaaaggtcattgacaaactgcgcttccccaccaagcaggagagccagctcaggaatgaagtggccattctccaggtgacccgaagggaccgtgactcagccgtacccctgcttactccttttaagtacaacctgggctacagtctaggggtgatcaagttagtctttctggaagagaagatacacatactggaactgaggggtattctgagcagagagggacaaggaccagtctgtgcaggtgacagggaaccccggagccatggaagaaacgaggccagggaggagggtggcaagacagtcagtgggctttcttctaaaggtatctagagtgccagaggaagatcttgtgggctagggcatcagcttgcctagcacgcgcaagcaccagaagaaaagcaatcaaatagaaaccaaagctacacacatacagtgcaagcttgctgttatcccacgcttcctgctatctctttctgccaccccggccttccccattagttcacaactcacaacgcagcaaagacctctccaggcgcttgccgcctctcgccatactgatcctcagtcctgatccctcttcccccattcccggacagagtctacggcaccccgggattgtgaacctcgagtgcatgtttgagactcctgagaaggtattcgtggtgatggagaaactgcacggggacatgttggagatgatcctctccagtgagaagggccggcttcctgagcgtctcaccaagttccttatcacgcaggtgcgctgtgcgccgtgacttccggctccccctggcggaggnnnnnnnnnnnnnnnnnnnnagccatctcgccagctcgaccagcggttcttaacctgtgcattgcaaccccttccagggtccgacaaccctttcccaagggtcacataacagatgaacagatatcctgcatatcagatatacagtagcataattacagttgtgaagtaggaacaaaaataatattatggtgggggggcagtcaccacaacacgaggaactgtattaaagggtcacagctgctccagacagagctggatacatttgatgcattgcccatgtcttgcttacattgtttattgatggtatcgtcttctattttaagatttatttatttggtttctaagacagtgtacactgtctctcttgggtgttggtggtacatgtctttgatcccagcacttgggaggtaatggcagacagatctttaagtttgaggccagcctagatgatagagcgagttccaggacagccaactcctccacctgttctgccatcttgccaacaaaacaaattttgctgttattggttattgctttgttttgattttgagatgtgggggtcttaaaatgtagctctgcctgtcatggaactcgctttgtagaccagactaacctcagattcactgaactcatggaactcctctgtagaacagactagcctcagaatcaatgaaatggtgattggtgcacgcctttaatcccagcacccgggaggcagaggcaggcagatctctgagttcgaggccagcctggtctacagagtgagctccaggacagccagggctacacagagaaaccctgtctcaaacaaaactaaacaaaacagaaaacaaaaacccaccgaggtccccctgcctctgcctttcaagtgctgggattaaaggcgtgtgctatcacatcagacctaaaaatggtttttaattgtaccacatgaaggaagtgtcttgggagtccctgctgttttaatagctcattagggttccacgctccgtcttcccaccctccccactgtagcccagtctttctagagttctatatcgagctcttgagagtaagtggctctgctttgggatcccttccttaacgactgcctcacttaggtaacatccttagggatgcagagaaaggcctgggtgggccttggaggcgtgaacatcagcttgatcctccccttcctttctcacttggccctgcctcctctgctcagatcctggtggcgctgagacacctgcacttcaagaacatcgtccactgtgacttgaaaccagagaatgtgttactggcatcagccgatccgtttcctcaggttcgttatgtcccctcctagacaaggacaagtcccaacagaaggggggtggagagtgactaatggtctagatgcaggtgagcttcacacccttggtgacccagcttcataagacaagggcttgatctctcacccagacacattctggggctacaaagttactacatactgggcaccctcttccctgctgttacatttaagatagttttgttgtgtcactggctttagtggtccatagtctagctaaacaaaggaaaaaagacaagaggtacaagaaatatatgcatccctttccttcgctgaggtagtagggatagtggtccacatcacttctctcacatctcattggtttgtctcaccttccagggatggaacctagggccctgcttatgtactttaccactgagccacgcccccagcccctcactgggggattctaggcaggggctctaccattgagccacgcccccagcccctcactgggggattctaggcaggggctctaccattgagccacaccacagcccctcactggggggttctaggcaggggctctatcactgagccataccccagcccctcactgggggattctaggcagggctctactactgagccacgcccccagcccctcactgggggattctacacacgtactctaccattaagcttttaattcttatttgtggcaaagtcgcaatagttctttgttggaacctatctcatgctcaagttttctttacttttcttaatctgtatttgttctgcattaaaaactaaataaatctgccaagcacatgcatttaatcccagcactcgggaggcagaggcaggcgaatctctgtgagtttgaggccagcccagtctacagagagagttctaagacaaccagggctacacagagaaaccctgtatcaaaaacaaaagaaaataaagctaactaacagatagatagatagatagatagatagatagatagatagatagatggatagagtcactcaggctaaccttgaactgtctattgtctgggctagcctcgtatttgtgatcctagctcagcctccccagtactgagatcaaatacctgcaccagccctgcatacctggtcctctttaatccccagaaagtcttagacgttaacccatccccagtgtggtggaatcaaggtccttgttgaaaatcttgggcccattctgactgggcagacttctagaatgttgactatgttccccttccagtccataatcctcctgccctgtagggaccattaacaaagggtgaggtgcagactgtaacccaacccaggaggcagacagttggctttagagagcatttaatagagacgtcttcataccgggcccagtccaggaactacatgcggattaattcatatcatcctcatcacagccctttgagacaggtgttagagatggggaaactgaggtacagagaggggaagccactcacccgagactacaccgctagtgagtgacaaatcctggatttgaaccatcattcaagtattgtttggaatactgaggtggtggttgggggtggacacacagtgnnnnnnnnnnnnnnnnnnnngggacatgttggagatgatcctctccagtgagaagggccggcttcctgagcgtctcaccaagttccttatcacgcaggtgcgctgtgcgccgtgacttccggctccccctggcggaggcgtggagaaaaggctggtgccctaggcactcaagagggcaaattagagaaatagatggaagtctcattaataacattaaaaaataaacaataggccaagcgtggaggcgccagcctttaatcccagcacttgggaggcagaggcaggcagatttctgagttcgaggccagcctggtgtacaaagtgagttccaggacagccagggctacacagagaaaccctgtctcaaaaaatcaaaaaaaaaaaaaaaaagagagagagagagagagagagagagagagagagaaataaaaataaacaatagcaggacaagaaaccggtgtggtggtgcatgcctagcttttgggaggcaaaggcagtggatctctgtgagttcaaggccagcctggtgtatgtagtgagtttcaggagagacagggctacattatgaggcccatttcaaagaaggaggaggaaaaagaaaagaaaagacaaaagaaaaggacaactggggcttagtaaatactatgacattattattacagtctctctgtgttagccctgctcaccatccaaggcagatggctatctttgtcaccactgtgtctcctgtctccagcctgggaaaagcatggagcagatctgggggagcgttgatcaaataacctagtgaaggactgaaagaccgaggaaggggaacccatttcccctttcatagtaatagctattattggccctgttttaatagtcttcccgagtgctgggattagaggtgtctaccactactcctggtttcctttccttttttgaggatcttgtggagctcaggctagtccggaacaactcactgtgtagacgaatatgcccttaaacgtgggattctcatgactgtatttcctgggtgccaggattatggacttgtaccaccatgcccagttaaagcagtgctgggaagcacgggtgccctccaccaagcccagcttcttactggctgggagatgcgggacagtttgaatacacctttaggcagctgactctttgactccgttggtagaatccttgcctgcctagggtgcatctagccttgggtaggcgcttcagcactgaataaacgggaacagcctgttatgggaggccggaagatcaggacttcaaggccgtccttgcctttatcgtgaatgtaagggcagcctgggctacgtgagaccctgtctcagaaactaaaaaacaacttttattgtctaaaaccttttctgtctttttccaccaactgagtgggaagatgcgtgttttcacacttcttactaatgctggataaaaataattaccagctcagaaaacaattttttttaaagatttattaaatatacagctttctgcctacatgaatgcctgcaggccagaagagggcatcagatcccattacagatggttgtgagccaccatgtggttgctgggatttgaactcaggacctcctgaagagcagtcagtgctcttaccccctgagccatctctccagccccatgaacttttgtacttatggccttttgtctttttgagacacaggatccaatgcactcgatgctggcctcatgtgattctcctgcattatcctttccaatgctggggtcacaagtgccacacactcaggttatttattttggtctatactttatgttaaattttgtactttttaaaaaaactaatgttgagactggttctcactatgtagaccaggcttccctggaactcatggagatccgtctgcctcagcctcccaagttttgggattaaagacatgtgagctttattattttctatgtgtatgagtatttaccttaatgcatgaagatgaactgcgtatggtatatgcaataccagtggacgccagaagagggcatcagtttccccttggaactggagttgtgaagcaccttgtattgtattgtaattgtattgggaatttaaccctggatcttcggaagagcagatagtagtcttaactattgacctgtctctccagcccttgttttggggttggtgtttgttgttttggtttggtttggtttggtttggtttggttctggacacaaggtcttactatgtatccctggctggcctgtaattctctacttaagacaaagctggcctcacacagcaatgcctctgtctacaccttcaaacaactgggcttgcagacctgggtcaccaagcatgcttattgcattacaagtgctctttatatatcacagatgtgaggtcatctgtcctttatgctatttagtattgtattatatttacagtgagaatttctgtatataagtgtatgctgagtgccacagcacatgtatggagctcgtaggacaacttgtggaagttggttcttccttctcaccgtgtaggtcccaggaattgaagtcaggcttgctggccagagtctttacccgctgagccatctctgcaggcttcttccatccttttttattccaatatttgttttcagcttgccttccttactttcttttgttcttcttatctttgttgttgttgtttgagacctggtcttctatagcctaggctggccttgaacttgccatttagtcaagaggactagaatgccctgatctacctcccgctacttccccagtgctaagatggaacatttctgtgcatgctagctaggccatcactccaccccagctttcattctctgtagaattttaacctctgcggtgttggacattccctggtgtggtctgagtttcagtcctccctggaaaggcttcccgtcccttcccccccccacacacacacacccacacacacaccctacacacacccgggactctgctcactctggggtgtttctgcaaggcatgcctgctgtactttgctgcagctgctctgaccccttccaatccccaatccaaatatgcctggatttgccgagcatgctgggagatgggacagaggtcccctgaggtagctacatcctgactgcatggaagagggagctgagtacttttagcaaccaaagtagtttctttctctggtcttccatttcatccggtctctctctctctctctctctctctctctctctctctctctctctctctctctttctctctctcctctctcctctctcctctcttttctctctctacagatttttttctgtcctctgggctcttgcctgctccacctctaagtactggacccagttctttgcctcaggaactttagacctcaccaactacccttccaggtaggtaccattaagtcctgtgctcaaaaggccatggtgacacaggtgtgtaaccctagcacccaggaggaagatgtacaggggtcggttcaaggctagttcagcttcataatgactttaggtctagcctgggatacataagaccctatcttaaaaattaaacaacagaaagcaggcatggcgctatagtatatgcttttgaccccagaactcaggagaaaggcagatgggtcccagtgaatttgaggccagtctggtctacatagtgagttcctggtcaaccaggactacatagagagacacagtctcaaaaaaaaaaaaaaaaaacaagatgaaataaaaatgtacaaaattaaaacagtttctagatagcatgagctagggtaaaaccctgtcttataaaaccaagggagggtcttgggatatagctcagttggttgcctaacatgcacgaagccctgggttcagtccctggcacgacaaaaaccaggaatcgtggcacatgcctgccagtactggggaagtggaggcaagggaaccaggagttcaaggtcattttgagcaccacaaagtcagcccagtctttgaatttgaaaccttatgtaaataggtagctaaataaatatcatagaaccattatcgctcccattttacagattaacaaactgagacttaaagatgcaacaatttgcctaaacccactttagtaaatatggagtcaggttttctgcttgagcgagtagctgctgtgtgacctctcgaccagcagctcttttttaaaagatttatttattatatgtaagtaactatcttcagacactccacaagggcatcagatcttgttatggatggttgtgagccaccatgtggttgctgggatttgagctcttcctttggaagagcagtcggtgctcttaaccactgagccatctctccagctcgaccagcggttcttaacctgtgcattgcaaccccttccagggtccgacaaccctttcccaggggtcacataacagatgaacagatatcctgcatatcagatatacagtagcataattacagttgtgaagtaggaacaaaaataatattatggtgggggggcagtcaccacaacacgaggaactgtattaaagggtcacagctgctccagacagagctggatacatttgatgcattgcccatgtcttgcttacattgtttattgatggtatcgtcttctattttaagatttatttatttggtttctaagacagtgtacactgtctctcttgggtgttggtggtacatgtctttgatcccagcacttgggannnnnnnnnnnnnnnnnnnnccattctgactgggcagacttctagaatgttgactatgttccccttccgtccataatcctcctgccctgtagggaccattaacaaagggtgaggtgcagactgtaacccaacccaggaggcagacagtggctttagagagcatttaatagagacgtcttcataccgggcccagtccaggaactacatgcggattaattcatatcatcctcatcacagccctttgagacaggtgttagagatggggaaactgaggtacagagaggggaagccactcacccgagactacaccgctagtgagtgacaaatcctggatttgaaccatcattcaagtattgtttggaatactgaggtggtgttggtgtggacacacagtggcgagcaggggaaggtggcgccatcatcccgcacaaccttcccgtgtcaccgttgcaggtgaagctctgtgactttggcttcgctcgcatcatcggcgagaagtccttccggcgctcagtggtgggcacgcctgcctacctggcacccgaggtactgctcaaccagggttacaaccgctcgctggacatgtggtccgtgggtgtgatcatgtacgtgagccttagtggcacgttccccttcaatgaggacgaggacatcaatgaccagatacagaacgcggcctttatgtacccggccagcccctggagccacatctcatctggaggtgagctactgtggacagaccaggaggcaagagggtggggaagaagccaggccgcagattcatggattagtaagtgtggggacagaacagtgggcatgagagtagagcatggcaaggccacacctagtaggtgaggctgtaagggattgggcaaagctgggcctgggtgggcgggactatgaagggtgggtgtggacccgggtcaaagtgggtggggctgaaagagaagggcagtcaaagaggctgggctgtgggagtgggtagacctccgaaggttaaccctacagggtcttgtaggtagaccctggtacccaggggtgtcatggtggctgaatgctctaggacacgtacagaaccagggtagactctttctttttctttttaattttgttttgtgcttactttatttcgtgtgtatgggtattttgtctgcatgtatgtatgtgcaccatgtgctcctgaaggccagaaaagtgtccgatctcctggaactaaaattacaggcagttgtgagcctccgtgtaggtgctgggaacttaacccaaatcctttggaagagcagccagtgctcttaaccactgagccatctctccagttccaggtcagctgctccgtctgtctatctgtcttccttccttccttccttccttccttccttccttccttccttccttccttccttccttcctttctttaatttattttatgtgtgtcagtgttttgcctgcctgtatacatgtgtgcctggtgacagaggaggtcagaaaagggcattagatcccttacaactggtttttactagttatggttgtgagccaccatgtgtgtgctgggacttgaacccatatcctcagcaagagcagaaagtggtatttataagtacactgtagctgtcttcagacacaccagaagagcatgacagagcccattacagattgttgtgagccaccatgtggttgctgggaattgaactcaggacctctggaagagcagtcagtgctcttaacctgctgagccatctctccagccccaagtctggtccttggtattgtttttcttttgcaacagtaaggcttgagcctagggtctcatgcatgatgaagttctctttgactaagctgtatccccagccccgttgttgtgttgtagtttgaggcagggtctcactagattgcccaggctggctttgaactcatcttgttgttcagttaggtattggacagtagctgggatggcaggcctgggagccaccagacctagctgagactcaagttttaatcacggtgtgtagtttggaattcctgagacaggcgcatggggccttggagatgggatgcaacttgtttgtgtaggaccagagaggaatgggaccagaggaagccagagtggcttgcatgggggtagagcctctctagaagggaactggagcccaactctgtgaacggagcagaggtgagcctgcagctttggaaatgtgtccagagagaaggcagttcagtctaggggtgtaactatggggtggtccagaagagaggtgctttctggggatccaggacctgatggagatgggaggaaaacagagtcagggctgggcggacagtttgatattttcatcagaggctcaacagtgaccctgggtcttaagacaagaatgtcacctggtgacttgtcctggtagactggggtgtggggtagagctgtgagaggctgagctggggcggtcttgtttgatttgttttgtttgcttggctttggactgtgtagctgaggatacacttgtacttctgatctcctgccttcacttcccaaacgctgggattacaggctgatacaagcagagcctggtaaggctttggtctccattggttcctgaatacaatgtaacagcttttcactaacatttccactgtgttagtataggaagtctattttgggagtacagggcagtggtagagcctctgtcatgagtttccaagaaggggctgcaggcatggctcagtgcaagagcctctgtctagaaccccacagtgaggggctgggggtgtagctcagtggtagagcttcttgtcttaggatcttccagtgaggggttggggaaggtggctcagtgttggagcacatgtctagaaaactatcctgagaagctgaggcctggccaatggtagtagtcttggtgtcatggtggcttgagactcttggagagtacagaaccagggtactaggttccctctacagccatgtaacaagaacaccattataaattatctagagccggacagtggtggcgcacacctttgatcccagcacttgagaggcaaaggcaggtgggacttctgagtttgaggccagcctggtctacagagtgagttccaggacagccagggctacacagagaaaccctgtctcgaaaaactaactaactaactaactaaataaataaataaataaataaataaataaataaataataaactatctagaaatggttcagaacaagcagggagactatgtgcggccatatgcaaacactctgctgtcttctatacaggacttgcatctatggagtttggtatccatggaatccctgcagaccttgcccctaggctagcacaggcccacatagtgacgctttgtccctcaacatgtgctgccattgacaaagcctcagtggggctttggcttgaacacctggtgctaagtaaccatcctttcacaaaggccgggcttccttctctgggtctcctgcaggcagcagtggcttcagagtgtggccttttgtcaatactgcacatcactgttagcgccctactggtcagagtaatgtcatattccatttgaaataaatgtgttttcaccccaaaaggtatactgttcaaaactggaggtagaagggctggacagatgtctcaggtgctaagactgcttgcagctctttccgagggccagggataggttcccagcatgtgtgtctgggagctcattagcatctgtaactttagcaccagggattccaatacttgcttctagcctaagaagataccttcattcacatgcatgcacgtgcccacgcgtgggcgcgcacacacacaaataaaaatattttatttgtttttttttgatacagtgtcttattatgtaaccttgactgtccttgaactttcagaaacccatatgcttcttgagtgctgggattaaatataggcttcttctaccacaatcaatccaaaattaaataatatttttaaaaattagagctgatcataccaccacatacttaaaaatcccagtaattgccaggcgtagtctaggctggctttgaactcctgatcttccagcttccacctcccaagtactggaattaccagtgctgccaccatgagtagcaagatttgcaatttaatgagaaaagcaagcgtagagtttggtaccctgggccagtgctagaggtttgcctttgtggcagtcaggatgggatgaccttctggaagagaccgcctatccttcagagcttcatctgtctccttcccccacagccatcgacctcatcaacaacctgttgcaggtgaagatgcgcaagcgctacagcgtggacaagtctctcagccacccatggttacaggtgacgtagggagggggcctagaggaggcggcagagctaggtctctaattggctgggtgagtgggaacgttatgactcgcttgttgctgtgctgtggttggggatggggctacaccgctattggctgagcaggttgtgggctgtggtgctttgccatcattggtcccagcagaatccaggctgttgctgagattgctgtattctgcccagcttgtggtcccaaagctaacccagtttttcccggctcaggagtaccagacgtggcttgacctccgagagctagagggaaagatgggcgagcgatatatcacgcacgagagcgacgacgcacgctgggatcagtttgtggcagagcgccatgggactcctgcagaaggggacctgggtggcgcctgtctgccgcaggaccacgagatgcaggggctggctgagcgcatcagcatcctctgaggccagtgttccccctgggcagcttgctttctttggagtcctgcacatcatcccagaaatgaactcttgtagaggaagcagcttcctgcgcagactggaggggccagggaaatagactcttcccagggccatgatcttagtccctgatgcctcaaccttggagcgataaggctggagagttgactctgggggtaaaggcgcttgccaccaagcctaacaacttgagtttgattcctgggatgaaccggtttggagaattgactccttccgtttgtcccctgaccaccataagtgcccacataaacacaggcaataaaatgtattttttctttttataacaaatgaagcacccactggccatggtgataatataatcccagcacttggagaggctgaggaaggagggtctctttaagttcaaggccagccaaggatgctacaaaaaaaaaaaaaaagacaggtctttttctgtgctgggaaattccagcgcttgggaggtggagacagaagagccaggtgttcaaggtacttaggtacgtggtgagttccaggccagtctgggctgttaagaccgtctcaaaaacaaagtaggggctgcagaaggcagggaagatgggggagggtgcgagggtgggaggggaagagtttatggaggatttcctggagaatataagaaagggataaagtgcctgtagtctagagtgcacagctttaatcccagcccggatcactggagtgctggaggatgagggggagggggagaaggggaaaggaaggaaaggggaggggagggagaagagaaagggaggggaaggaggaaggaggaatgaagaagcaccatgacagatgagtgggtacagttctcaggatggagaatcttaagtcctaaatgcatttaaggggcagtggatggcccttacctacagcccaccagtgaggagctggggttggctactgggatatttgtctagtatgccagggtcactgacccaacatctcatactatgaaaagaagagcaagttgggggtgtcgcacacctgcagtcatagaacactgcagttgtagaagcagaagactgagaaggattagaagactgagattcacgggcagatgagacggctctgtgcttgcagaggaagtctgagccaagttcaagccccaacccagacacctcggggatgagaacggactccaggaagttgtcctctgacctccagatcagtatagcacacacatgccagccaccccctactcctacacacacacacacacacacacacacacacacacacacacacacacacaggcaaaataaaaaaaaattcaatgccatctttaactatatgtattatttttaaattatattttaagaccagtctgggatatatctgccatgcttttgtcctccctccccccccacctctgtttttcagggtcctagatggaactcactctgtagaccaggctggtctccagttcagagatctgcctgcctctgccttccaagtgctgggactaaaggtgtgcaccaccaccctcctttcaacacaatactgaaaggagagacagctcaaaaatgaaaggtcctaccaccaagcctgacaacctgagttctatccccagaacccacactgaaaggagaaaactggctcccaaaggtagtcgtctgagctccacagcgtgcttggtggcacatgcctttgcccgatgaatcatctctctagcccagaggcataggcaggacgtccagggcctatctagccagcttgctccagggatcctctgtctttgctttccaaggtgctgaagttacgggcaggcttctgtgcacatcgattacgtggggatccaagtaccagtcctgtgtttgtgcagcaagttcgtctttgtaccatgatgatgtcaaagactccccttcctccttttcgtccttccatttgcggttctggggatgaggcctgagcccttacaaattccaggcaaggcctgtaccactgagagccacctagtacagcctgcgagtgcactcatggagacaaaaagtctatatcatgccagacagtggtggcacacacctttaatcccagcactcaggaggcagaggcaggtggatctcgggagttcgaggccagcctggtctacagagtgagttccaggacagccagggctacacagaaaaaaaccctctcttggaagaaaatgaaaatgtctctatcatgattgttcctctgttaccctctaccttgctttattgtatttaattttggggcagggtgtgttcggtgtcatgcctgcagaggtcagttatctctgtccgccatgtggacatgggcaccaggaacagaactcaggtccttggcatcagcagcatgatcgccttcccactgaaagccatcttgccggcctatctgtccacttcgtttttgaaacagggtctcttggtgaccctcaagctcactaaccggctggacatcaagctcctcctgcgtccattccccagcactaaaaagacaatcgtggaaccattgcatttggcctgttgcatggagcccgggactcttgagttcactcatgttttcacggcgagcactgggcctgttgagctgccttcccaacctgagtgttttctgttgcaatgacttcttgacacactgggtgctccttcacccctgcccatttctatcagtgtgctcagtgattcggggtatgcggtggtgaccatgacacctcgggccctgctaccattgcatggacatacagatgagtcctggagacagtcctgagtaggcagggaagggatggaaatagggcagcctggggcagtctgagagcatgggcaggtgtggctaggggatcagagcatcgaagcttccagcttttccttcttggccctgaggctgtggggaaaggatttttttttttattttaatttgtttagagaccaagtctctctacctagctctggctgtcctggagctcactagaccaggctagcctagcactcactacccacctacatttgtctcctgagggttcctgccatcatgctgtcctttctaactctggatccctgcccagttctccagttgcttggtcaccgcaacttttagccctcaaccctccaacagctgagagtaaactgaggcttcatttgccatgactgttcatgtactgggggctgaaactagtaggattctagacaaagcctcaactattgcgcctcatctccagtcttttgtttggtcttgccatgtagcccaggctagtctggacctgcagatcttcctgcctaatcacttagagcacgagagtggcagacctgagccaccactcttggcaccatgaaaaaaaaattttaaaaaaatttttgagacagggtttctctgtgtagccctggctgtcctgaaactcactctgtagaccaggctggcttcaaactcagaaatctgcctacttctgcctcccaagtgctgtgagagtaaaggtgtgcgccaccactgcccagcaagactaaatatttcagtgtgtggtgtatgtgtgcactcacgcacagagtgcagttgcctgaggagaccagaagaggacagtggatcctctgatgctggagttaaagaggactgtgagcctctttttctctctgtgtgccagaaaccgaacccaggtcttctggaagagcaacagcactcttaaatcacggagccatttctccagtgctgggattacagatatgactcaccatgcccaagactcagttctttatgagtggtagaagctgttactccaaaaaaaaaataataaaaaataacagggttatacgtggtgacccactcctttaatacgagcactggagtagggggagtcagatacaacccagaggtggtctgaaagtaacaagccagtctggtctacatagttacagttcagccagggttacttagtgaaaccctcaaaaagcaaaacaaaacataattatgctgttaaacgttcagaataacttttttttagatgtagatgaagagcacagagagaccaaatacgtttcctagtgttactctgccttaaagtggcatagactcaccacatcaaagttggttattgccagatgatcataaaacattataaaagacagtttcacactatatttttctttcaatgacaggctgtcatagttagcccagattggcctcgaactcaccgcgattctacggccccatcctcccttccagatctgagcttttaaggagtcaaaggtccgtctgagaaatgggctatttcacaaacgttgccgacacaccgggtgtagtgacacatgctggccgcgtgagggggcgctagcccggcttgcccagtgagaagaggcagaatgcagccttcgaaagcaggcaggctcagatttagaacttcagaacgttgagaacagagcatctcagaagactgagaacaaagcctcttagaaccgtgaacaaaggcccctgcgagctcagactggtggaactcagctccaccgcacctggaagacaaaaaagacctcagattctcttctggtcaaagcatagaatatttcacccagggtcttgtaattccgtaaatgtgctgttttgatgagacagaaactcgctgtgtaatccaaactagcttgaaattcactatgtagtttaggctggccttgaactctcaattctcctcctggttcagcctcccctatgatggaattacagagccggtttgaacaggtcctgcttaaaagcataatcaaaccgtaagatgttcaatccgctttacttctgagggtctgggaaagctgcctggaagaggaggcgtgatccggattcaatcatcactgatgatccttctgcgcagactcagaagctgaaagtttgggaggggcggcaagagcagctgcggagctgtcacgtggatccagtctctatttatagaccacccttccctggacctggagagcccaatggcagccagcgctcgcccgcaagggggcggaaccagctccagaaccaagcgactggcaccaatgaaattggagcaagggcgggcttgcttcattgtgattataaagaaggcgtggccacagccccaggatcgccgcacaaaggggcgtggcgagtctgatacccccgtaggtagtcctgggcatgcgttgttaaggaaaaatggggcggggcggagccctgcgtcacggaaggcaacaaccaatagtaggtcgttgtcgtgccttcaggggcgtggtcatgtagatgaggcgcgggtgggcggcccaatgggcgggcgcctatgcagatgagacggtgacagcccggccagcgggcgggcgggctgctggggcggggaggtgggaccggcgagaggggcggccgtggggcccggccgggctggggcggggggccgcagccatgatccgggccttctcgttcccggtgagcccggagcggggtcggctgcggggatggttggaaggcagcctggccgggctctgcgagttgcattggctccgagagaggcaggagtaccgcgtgcagcaggcgctgcggctggcccagcccgggatggggggcgccgaggctgaggacgaggaggacgccgaggaggacgaggatgcggcagcggcgcgcagggccgcagcagccctggaggagcagctggtgaggggtcgcctgtccgtgcgtccatccatgcattcctccctcccccattcgttcccccacctccctgctcctgtgtccgtctgtctgtcttggtagtgtatgctcagcacaccggtcctagggtaggggagcaggcagggggaaagagataagactggagacctggcttttcctacccccaaatagagctgatagggaggatgcacggcctccgttggactcagcatggaccctgttaaccgtcctggatgcctagtgtgtgttaaaccaaacattcgtcttcttacagatttcctatttcatgagggtttgaaagtccccattttacagagaaaaaaactgaggcttagagacaggaagagactcacccaaggtcacacagccggcattcaaacataacctccctctgggccccgctacccggaatccatctttctttccttaagtctcggggtgcttggagatccctggagggggcggggtgggggaaggggaatcttcaggcctctggagagagagaccggctgctgagaaacccccgaacagtccctgaggacccccgggggcattttgatcaacccaatgacacttctttcttctacttggtcccatggctcagtaacacggggaggccaggtgaagatagctagggagtgaggggagagagagtatgattcgccgaggaactctaatgatgactttcaaattgaaaaggctccagctctttctccctccctacatcactccttgagtctggagaccctttccggttgttgctccaacctttccataccccagcatctctgtttcatttccttaacacagtctctgtctctatggtcttccaagacctgtaaagcttccaaaaacagaggagattagaaatggggtcgtggtctgtctctaggcctcaatgtttttctgcctaatgtctgtctccatctctcttcccttcccccagcccactcccctggcccatcccatcccggtacctaagcctctatgtgtgtacatgtgtgtggtcagagcttcccgtttagggaaacctgagccgaggctgtgggggtggagacggggatctggctgttgctgacctcggctgccccctccccagatgggaaatggggaaaggggctgaggccagacgcccagccccacccccaaccggcctgacggtgcagggagtgagaccttacacattcttctccaagcagaaacagctgtgggaggccccgccccctccaaaagttaccgaggaggggaggtgttcagccgctacccctgccctccgctgcctgcgctttgccagacccctccatccagtccactaagagggtgggagaaggcaccactgcagaccagtagtggtctggcctctctccctcctcactctctgcccctcttctcagtgctgagtcctcctggttagcatgaagtggtgatgggagagcagacctgtacctcacactccaccccttccccaatgtaggcagtagaggctctcagccaggcctcaaagaggaggaggtggaaggctgggacaggagcctgcctgatggaggagtagaaaagcgctaaatataaacacctcaggtgttgagggctcctgggtctttcagaagaggaagtggggtcactcctgattccagaaaccccctgtcttataagacaacctacatctccatccatcactcagaaacaccccctatgaaacaaaacagaaaaccccgaagttagacttggtgactctgtgagacatgatgtgggcatgtcacattcagagtggaagtattgcagagagaggggagtggatattgtgtatagaggggtcctgttgctcctaggaaggaaaaatatcccttccagcaagaaggacttgggttagacttgcagaaggactttttttttttttaagatttatttatttattatatgtaagtacactgtagctgtcttcagacacaccagaagagggcatcagatcttgttacggatggttgtgagccaccatgtggttgctgggacttgaacactggatctttggaagagcagtcgggtactcttacccactgagccatctcaccagcccaggacttcttaacatagatgaaagggcaccggaatgtaaagagaggaaaaaagatatggggacatttgggcaaagaagtctctggggacaacaggtcatttagagatgaactcaggctgtctgttccccaactcttgactcctccccctggtggaaaaactgagatgacagttatggaatccatcactcccccaaaagtccatcattttacatataattttaattatgcaagcagtgttagaaattattccttgtaagatactgtcttgtaataatgtaaactggccttgatgaagtgctgaaaaagacaactgatttttcaattccttttagcttttccttcgagctattaaagaccaagtcatgtgatgccacattgcagataaggaaagtaaagcccagagaggtcaagacacctacctaaggtcttacagctgggcagtggaagagatgattggatcttggacactgagggccaagtctcaccttaaatattcattggcccgcacagttcccctcatcttccatttgattccctatgctgagaaggccactaccttttgaattggcttgagtctgttctgatttttttctaatgtatctactctcaaaaacagtttgcatgccaggaaagagatggagaataccgggcaaagctttggttttttatttaccaatccaggggatggaactaagggtaaggaacaggataggcaagtgctgtactattcagccacgcccccagcccctcactgggggattctaggcaggggctgtaccactgagccacgcccccagccccctcactgagggattctaggcagggtctctaccactgagtcacgcccccagcccctcactgggggattctaggcaggggctctaccactgagccacacccccagccccctcactgggggattctaggcaggggctccaccactgagccacacctctagcccctcacaggggctctacctctcctcctttgttgttttcagtttagttttggtttggttcagtttttgagacaagatctcagtgtgtaacccctggctggcctggaactcaaagggatccacctgcttctgtatcttgtctggccctagccctctttttgaggctgggattctctgattcctagacaggctttgaactttgctcctgtctgcttcccagagcactgaagaatgtcaaaccccacccctggcttgtctcgaaggttttgctgttttataaaagtccagtttcttgggtgaggtcccaagactttgcccatggtcctcgaaatggggtccagccagaagtgacaccaggtatggaaatggttagataatgcaaatttgggggttcaaatctaggtatgtccagaagctcacaagctgggacttgccaactttgggttttgaagagcccccatgtttggccggacttaggaccattgccaactcctgtcggcagtgcagcatatagaatggtggcccccccattagatcatcaccactgggtctgcactcaggagtgctctcatctgagcactcgggccctctggagatgaaggcaggaagattgaaagtgagtcatccttggctacatagagagtgcaaggtcagccttggctacctgaaactgtctccaaacccaaaaaagatgatggcgttgtagttgtcttcgcttaagtgaagtctgctctgctcccatcatgatgaagttacaggatggcacattttaaagaatgtgtccctgtgactgtgattctggcttcctccctcccctgcatgtcctttctctgctcagtactgtatcacagaaaaatctgccttcatccctcttaacaactgtgtagtattccaccacgaacattctagtattcattcatcagacgtttcctaagttctaagcccaagggagaagagtgccactgtgaacataaaacctctgtcctagtgagaaatcacttcttattgggagacatgataaaccagtgacactttttgtgcatgtgcgtgaggaagcatgagaaaagggagaacgacagggtgcagaatggcaaagggactatttttaaaaggcagaggatgggagatcacatcagaaaagcccaagcagtgtgtgtgtgtgtgtgtgtgtgtgtgtgtgtgtgtgtgtgtgtgtgtgtagggggcgagggtcatgttgcacaccgaatgcagtggtaaccagagggccatggtaaccagagggccaagcagcagaccagtctggtccacttggaacatgacacaggcagttgatggcagcctgtggggtttttgtatatttttttcctcagatgcctcctgatagtatatgcacaaacttttcttttttctttttctttttaagttaaggttgattgattaggccacgggcatccaagtgcacccagagtgggggacatttgttgaccttcattgcacagacagggccacatgggggtttctttctgttctgggaggggaagaggccaggcctggaggagacaagggctggggggtgggggaggactgtggctgctgcctagagccaggccagtctttctgccctaaataggcagggctgggtgctggccccgccctcccgccagcttccagacaagccgcttttgtctgagggtcaactgtctgcccctggcagccgctacctctggtctcactgagtcccctgtgagac

SEQ ID NO: 418 - DNA, 3328 bp, Mus musculus
tagagctacccgcgctgtgcgaccctcccttgtccccgacccgccccgccttcggatcccgccatcctcgcgtctctcaacctgacagatttctctctcaaatgcctgcgttcttaccaccaccgcaagagagctctcggatctaggtcccagggtccttggtgagctttgggcggcagatctggatctggcccccatggccgccgccccctcccatcccgcaggactccccggctctccggggcccgggtctcctccgccccccggtggcttggatctccagtcgccgccacctctgctgcctcagatcccggctccgggttcgggggtctccttccatatccagatcggattgacccgagagttcgtgctgttgccggctgcctcagagttggctcatgtgaagcaactagcctgttctatcgtggaccagaagttcccagagtgtggcttctacggcctgtacgacaagatcctgctcttcaaacatgacccaacatcagccaacctcctgcagctggtgcgatcagctgcagatatccaggagggtgacctggtggaggtggttctgtcggcctcggccaccttcgaggatttccagatccgaccgcatgctctcactgtgcactcgtaccgcgctcccgccttctgtgaccactgcggggagatgctcttcggcctcgtgcgccagggcctcaagtgcgatggctgcgggctgaattaccacaaacgctgcgccttcagcatcccgaacaactgcagtggtgctcgaaagcgccgcctgtcatccacgtctctggccagtggccattctgtgcgccttggcagctccgagtccttaccctgcaccgccgaagagctggcttgcaagaaactgctcaagggtctattccgccagggcctgcagtgcaaagactgcaagtttaactgtcacaaacgctgtgctacccgcgtccctaacgactgcctgggggaggcgctcatcaatggagacgtgccgatggaggaagccgctgattacagtgaggctgataagagctccatctcagatgagttggaggattctggtgtcatccccggctcccactcagagagtgctctccatgccagtgaggaagaggaaggcgagggacacaaggcccagagctcgctgggatacatccccctgatgcgcgtggtacagtctgtgcgacacacgacccggaaatccagcaccaccctgcgggagggctgggtggtccattacagcaacaaggacacactgaggaaacggcactactggcgtctagactgtaaatgcattaccctcttccagaacaacacgaccaacagatactacaaggaaatcccgctgtctgaaatccttgcggtggaaccggctcagaacttcagcctcgtacccccgggcaccaacccacactgcttcgagatcatcacggccaatgtcacctactttgtgggcgaaacccctggcggggccccgggagggccaagtggacagggaacagaggccgttcggggttgggagacagccatccgccaggcactgatgcccgttatcctccaagatgcgcccagtgccccggggcacacaccgcacagacaagcgtctctgagtatctccgtgtccaacagtcagatccaagagaatgtggatatcgccactgtctaccagatcttcccagatgaggtgctgggctctgggcagtttggagtggtttatggaggaaaacacaggaagactggcagagacgttgcagtaaaggtcattgacaaactgcgcttccccaccaagcaggagagccagctcaggaatgaagtggccattctccaggtgacccgaagggaccgtgactcagccgtacccctgcttactccttttaagtacaacatgggctacagtctagggagtctacggcaccccgggattgtgaacctcgagtgcatgtttgagactcctgagaaggtattcgtggtgatggagaaactgcacggggacatgttggagatgatcctctccagcgagaagggccggcttcctgagcgtctcaccaagttccttatcacgcagagtctacggcaccccgggattgtgaacctcgagtgcatgtttgagactcctgagaaggtattcgtggtgatggagaaactgcacggggacatgttggagatgatcctctccagtgagaagggccggcttcctgagcgtctcaccaagttccttatcacgcagatcctggtggcgctgagacacctgcacttcaagaacatcgtccactgtgacttgaaaccagagaatgtgttactggcatcagccgatccgtttcctcaggtgaagctctgtgactttggcttcgctcgcatcatcggcgagaagtccttccggcgctcagtggtgggcacgcctgcctacctggcacccgaggtactgctcaaccagggttacaaccgctcgctggacatgtggtccgtgggtgtgatcatgtacgtgagccttagtggcacgttccccttcaatgaggacgaggacatcaatgaccagatacagaacgcggcctttatgtacccggccagcccctggagccacatctcatctggagccatcgacctcatcaacaacctgttgcaggtgaagatgcgcaagcgctacagcgtggacaagtctctcagccacccatggttacaggagtaccagacgtggcttgacctccgagagctagagggaaagatgggcgagcgatatatcacgcacgagagcgacgacgcacgctgggatcagtttgtggcagagcgccatgggactcctgcagaaggggacctgggtggcgcctgtctgccgcaggaccacgagatgcaggggctggctgagcgcatcagcatcctctgaggccagtgttccccctgggcagcttgctttctttggagtcctgcacatcatcccagaaatgaactcttgtagaggaagcagcttcctgcgcagactggaggggccagggaaatagactcttcccagggccatgatcttagtccctgatgcctcaaccttggagcgataaggctggagagttgactctgggggtaaaggcgcttgccaccaagcctaacaacttgagtttgattcctgggatgaaccggtttggagaattgactccttccgtttgtcccctgaccaccataagtgcccacataaacacaggcaataaaatgtattttttctttttataacaaatgaagcacccactggccatggtgataatataatcccagcacttggagaggctgaggaaggagggtctctttaagttcaaggccagccaaggatgctaca

SEQ ID NO: 419 - protein, 923 aa, Mus musculus
QISLSNACVLTTTARELSDLGPRVLGELWAADLDLAPMAAAPSHPAGLPGSPGPGSPPPPGGLDLQSPPPLLPQIPAPGSGVSFHIQIGLTREFVLLPAASELAHVKQLACSIVDQKFPECGFYGDKILLFKHDPTSANLLQLVRSAADIQEGDLVEVVLSASATFEDFQIRPHALTVHSYRAPAFCDHCGEMLFGLVRQGLKCDGCQYHKRCAFSIPNNCSGARKRRLSSTSLASGHSVRLGSSESLPCTAEELACKKLLKGLFRQGLQCKDCKFNCHKRCATRVPNDCLGEALINGDVPMEEAADYSEADKSSISDELEDSGVIPGSHSESALHASEEEEGEGHKAQSSLGYIPLMRVVQSVRHTTRKSSTTLREGWVVHYSNKDTLRKRHYWRLDCKCITLFQNNTTNRYYKEIPLSEILAVEPAQNFSLVPPGTNPHCFEIITANVTYFVGETPGGAPGGPSGQGTEAVRGWETAIRQALMPVILQDAPSAPGHTPHRQASLSISVSNSQIQENVDIATVYQIFPDEVLGSGQFGVVYGGKHRKTGRDVAVKVIDKLRFPTKQESQLRNEVAILQVTRRDRDSAVPLLTPFKYNMGYSLGSLRHPGIVNLECMFETPEKVFVVMEKLHGDMLEMILSSEKGRLPERLTKFLITQSLRHPGIVNLECMFETPEKVFVVMEKLHGDMLEMILSSEKGRLPERLTKFLITQILVRHLHFKNIVHCDLKPENVLLASADPFPQVKLCDFGFARIIGEKSFRRSVVGTPAYLAPEVLLNQGYNRSLDMWSVGVIMYVSLSGTFPFNEDEDINDQIQNAAFMYPDWSHSGAIDLINNLLQVKMRKRYSVDKSLSHPWLQEYQTWLDLRELEGKMGERYITHESDDARWDQFVAERHGTPAEGDLGGACLPQDHEMQGLAERISIL

SEQ ID NO: 420 - DNA, 62658 bp, Homo sapiens
tggccatctgggagcctttggccagctgggagcctttggccagctgggagcttttggtgtgggtgtatgtgcacattttactgtgacagaatgggatttccagtgttggtgaccctagtaaggctgggtggggactgctgtgagattcaggaaggggggtcagagcagaggcctgagaagtggagtgtgccatggggtccctctgcacgccccaagatgtcatttcatcttggggaagtgcagtgttctgagccccgctaggggagggggtgagtgaaccacacagtagcagatcctctgaccctaaagaactgtggcagaagggacagctaaggcagggacgtcagctgggagcccatcttggggcatggtgctgaggcttgcctggtactctgctcgtcatctctccggaacctggccctctccgggtcccctgctgggtgagcggcaccagggcgcatgcagcgtggtggacagaggcccccacagctctcccacttgtgcactgcctccccttcatggtcacgtgtctggtctccatgccctcatctcccctgggacttcctggcctctcaacctctttctctgaggctaccttttttttttttttttgctccttgaggggatctccctatgttacccaggctggtctcgaactcctggggtcaaatgatcgttctgccttggcctcccaaagttctgggattacaggcgtgagccactgtgccccgtctgtggctacttttacctgcccctaatctgagcctctcaggggtggcaggaacaagccatgtcgttcccctgctctaaacacttccccggctccttgtttctctgaggctttttcttaggatgaaatgcgcattcctccggggctcaccacccagcacctgtctcatcccctgccactctccttgcctcctgcagcctgtaccactgacctctcaggcctgggctcgcccttgctgcctcagggcctctgcacgggccctttccctctccagggccctctccttatcttgtgaagtcctgctggctcgtgcttcctcaggaaagcctcagtggcccccagggaggagggcaggctgcctgatgtctctctgtgcatctttaattcattgccctgctcatggctgatgatcctgcacacttgtgggatggtccagttgtgtcccccattccccttcctctcaactgcaagaccccaaggggtcaggctcacctttgtctctccagaacccagcgcagtgtggggacttgttgggcgagcatggagactctgcccagcagaggaaggggagagttcccggctggagcccaggctctgagggcattcctgccagggtcatgtgggtggaagacagggggcctcaagccctgggtgtcggtgtctgcatgactgctgggatggatgcgaagacactgaggcagctccccccaaccccagctgtctgacagcaaagatgcttttaagaagacgtggaaccccaagttcaccctgcgctcgcactacgacggcattcgttccctggccttccaccacagccagtcggctctgctcaccgcctccgaggacggcacgctcaagctctggaacctgcagaaggcggtcacggccaagaagtgagggcagcaagctcagagccgggggcaggggcatctggggacgggggtgacagggtctcagtgacatcaggctcctctgtcatcccacaggaatgcggcgctagatgtggaacctatacatgctttccgggctcacaggtagggaggtgcccctgagcctgctagaaactcgtcctaaatgcagcctgactcctgacctgctcactgccatcgcgggaggcccacggcaggaggcaggacagcagggggctctgagtccccgcccccttcatgatatacacagccctggttcttggggctccatgctgactttcacatgccctggcagctggtactcagcacagcccttcaggggaggagatggaggtggggtgggggagggcaggggacaggcagcttgtccaggtagcatggccagagccccagtcactgaattccttttggccatccttgaagaatgctagtagggaacttaggtcctgtggccaggggaggccctgagcttgtctcatccccctttccacatatttgtcccttccaggggcccagtgttggctgtggctatgggcagcaacagtgaatactgctacagtggcggggcagatgcctgcatccatagttggaagattccagacctcagcatggatccctatgatggctacggtgaggacaacgcctcccgccttcccctcacatccactggggcctggccgtcccctccacgcacacacacgtcgcgtccacctcttgccaacactgcaggcctcaggagtgcgtgtgacggctcccctgtctgctctgttgtgagcagcgcgatgcagcgcgtggccaagggacgagccagccgggatgggaatgatggctgtgggaggaggtggtgaagctgcctgagaatctctgtgagccggcgtccagaaggcagtgctgaggcagcccaggctgggagcagcccatgcacaggcgtggctggccctggcagcctctgctctgccatgccgtgtactctgtgtgtggggatccgccagggtctctgcgtggttgaggggagggcatgtccagagaaagcagagaaggtggagttagctgggccaggctggagcgcgttggggctttctctttggagcatctaagacctaagtagggaagtgaccagactgtcacttctgttcaacatctgtccccctgttctctgccttttttttttttttttttttttttttgagacaaagagtctcactctgtcacccaggctggaatgcagtggcgtgatcttggcttactgcaacctctacctcctgggttcaagtgattctcgtgcctcagcctcccgagtagctgggattacaggcacgcaccaccatatccagctattttttgtatttttggtagagacagggttgcaccacgttgaccaggctggtcttgaactccggacctcaggtgatccacccaccttggcctcccaaagtgctgggattgcaggcatgagccactgcgcccggctctgcctccttgatcatgcacctggccctgtgctccaccttgtctgggcagagttcagaggtctttgtctcctctcaaggggaggacagactttagagaacaggctcacctgcacaaggtcaggatcggtcccagctacattagccaccacactttcggtgtcagcaggccagagctgctggtgtggactccagcaaccagggaagcagtgattggacctctgaatgaccagggggctttggagagaccaggcaaagcccatgcacttggccatgggctgaaaagactgctcgggccagggttgggaccaacccttgtccagcacaggctgcgtgccgctcctggggccacagaaccatgctgttccttcttccttaatggagcccgaaaaattctgtattgagctcccagtttctgggccctgcttggggagacagctgtgaatagagggaaatccctgccttctggagccctagaaccttccttggagagctagtgggcagtgtgagcagctgccgggctgtcctggcagtggacagttccgaggggcaccaggtgtgaagtgggtgcgtgggtgattggagcccagctgcctggggcttggcagagctggggctctgggctgtccagggaggagctggcagccctgacacagcccatttcctccctgcggtgggtgcagacccaagcgtgctgagccacgtcctggagggccacggggacgccgtgtggggcctggccttcagtcccacctcccagcgcctggcctcctgttctgctgatggcaccgtccgcatctgggaccccagcagcagcagcccggcctgcctctgcaccttccccacagccagcggtgagtgggggccccggtgcctcaccctggagctgtgcgggatctggaggctatcagagtggttcctgctgaggccccaggcctcccacccactgtcccccaccctggggcagggctgggtctgagggtccattcagcagccttctcttccctgtgccctcagagcacggggtccccacctcagtggccttcaccagcaccgagcctgcccacatcgtggcctccttccgctctggcgacaccgtcttgtatgacatggaggttggcagtgccctcctcacgctggagtcccggggcagcagcggtaagggggctgacatcagctcatggaattggtctcagtgtcttctgggccccacttcctcctggggctttggcgaccccttgtcagtcagctcagatgactcccctgcaccctcaggccctgagcaggaaggaagttgggtcccagtggagggcccccggccctcacagccagggcactggcggggctgagtggggagagcgcgtcagggccgccccgtcgggccctcttggtagagtggcggaatgtgttcatgtttgttattcctcttcccccgccccaaaacagggcccaggggctgcttgtgcagaaccagcgctgcggtcggggaccggagtgccctcgcccagcccccctcgacatccaggcagaggctggtgtaggggctgtcacgctgcgcttgtgcctctgttctggtcttcctgattttctgcttgacatccttccctcttcctgcgttttccttcaggtccaacccagatcaaccaagtggtgagtcatccaaaccagcctctcaccatcaccgcccacgacgacaggggcatccgcttcctggacaatcggacaggtgaggcctagccccttgtgctcgtagtgggtggggagggccagaggcaggcagcagagatgcttgcgtccctgtgggaggctctgggagtctctcgtccagtcctttcactctctcaggcgaggcccagagtgggaggggaacctgccacccgcccttctcgcctcaggtaagccggtgcactccatggttgcacacctggacgcagtcacctgcctagccgtggaccccaacggcgcattcctgatgtcaggaagtaagttgagcacactagtcccaccagggttggggagaaggggaggaagaggcctgggcactggctccaggcaagtgctcagggggccccgggggccagggctgggggaggctggtctgggcgggaatgaccgtggtgaccatagggggcagcacagtccgctggggccctcctctgggtcactggagctgcatcgtctcattcggcctctaagcagcctgtgcggttggtactttgatccccagtttacagatgtgggccctgatgcccagacgctttgtaacttggccattgaagctctgtaacatcagtccaggtctacctgggggtacccgtgggacttctgtgctcccaccctgttgtctctggataagggcattgaggccagcaacgtggctgtgcttagaagggatggagtgtgacgtgggtgggtggagaaggagactggaggtcgctgtgggggtgaagggtgaggcctgcagtgagtgcagcagtgagtgtgtgtgcacagaggcgcaggccgtggtgttggaggctgtggctgggctctgcctccgggcctgtgctggcagcctctggtgggtgaggggctggtcagtgagctccagcccagtgcccagacagggctctattctgggggccactagacagtggagggagctgagcctttgccctgcctgatcctcttgaccctaaattaaacttctcctcgccagggccctgcccagcctgccgtcctctcccctcttctccccaagcccctgctaaggctcttgtggccacccccacctcctgcctcaggacctttcccgcctgtccttctgcctggaaggctccctgcattcctcctggggccattctgtcctcacactgaccggctgggttgctttcttctttctcttcctgttgcccagctgcagcgtcaatgctgcggggcagggagagttgcctgttttgttcactgcccctgccgccctggggctcagtgtgcagtagctgctcaagaaatgctgggggatgagatggactgtggacaggaggggaccagggttctcctttgggcgggccacaggaggtgatgagcagagggtgagagaggagagttgagccccacttcccctgaggcctttggacaaggccaggtgaggggttccagggctgcgtctgagcgaggagcccagtgaccaccccttctgtccccgacacatgtgcaggccatgactgctccctgcgtctctggagcctggacaacaaaacgtgcgtgcaggagatcacggcccaccgcaagaagcacgaggaggccatccacgctgttgcctgccaccccagcaaggccctcattgccagtgctggcgctgatgccctggccaaggtcttcgtatgatgcccacctggccctgccctggccgccacgctggctggggtgtagggccgggcaggtggggctgaggtgagggcagaaaccccgcattctgagtctctgcacgcccatgcctagtactgccaggtgtgctgagccccgcagtccagtcaggggcgtcctgtgagaatcactgggggagccctgggcatgcaggggaggggttgaggccttagaggcgccctagaggcggcggctcagtctcccctcccttctctttcccgcaggggactcccagcctcgctggaggtgcagaggcctggcctctgtctgtttgccgtggagcctggtggtgctaacggccctttccccaggaatccctccccaacggctgccttccccaagcatccagcctggggatgggcccctttcaggaatcacccccgaggatggcctcggggtttccccctgtgccctgacagccgctcctggtatcagagctgctttccagagggcagcacagccagggccgggtgtctttagggatcagtttttccaagactccagaaggtgccaggttctccccttgagctcctgctcccccatcccccatcctcccagacctgggcaggagctgtgctgggagaaagggtggcagccgggagcctcagagctgagccccggcctggctgcccctcccctccggccctctccactgctttccagacactaaccaaggcttccaggccagggattgcccaacactcctagggcagccctcccagcgccccatggggtcgcccatgggtagagacggctttcttgtgcccctccctggggcatggagggtggagtgggcctcgggtccccctgaactccctgtatatctgtataaataacgggattttcatggcgccgccccacccgcattatcactgtgtgatggtctcagtcagtctcctccctgtctccactctttccctctatttatttcactctcttgtttggttctaccctgcaccctcggtccccttccaggttcctgtttataagccccaacccctctgtccccatcttgtatgtgaaaacttgtctcaataaaccctttggagtaagatgggtgacggtgccatctgttgagggcactggggactttgggggaggagtgaccggctctgcctgggttgggtggagtttggagagaggggatatgatgggttggggttttgtggtagggcagcaggggccggagacgggcccagagcttgggtggggtgtgggtggagagaagtggaggcactggaccgaatctccttgtgccctttctgtccctaagtgctccctccccaggggtagagccctggggagcagatactatgatgacagtccagctgaagcctcagccccgcctgggatgtgtgagggtggtggcgaggccaaagggctggtgcccagaggacgtaaacccccttcctgttcccatcccaggcccacaaggagcagggagggaaaaggctgcacctgccagtggaggatgatggctttggggcgcaggctcctccatgctgggaggaggtgccgcaggtgcccgagccctcgtggctcatgtcctgatgcgtccctcctttcccttctcagtggtccacgtctactgtactgagtgctttacatggcatttcactgggtccacagccttaaaaagagggagcaggtgtccacatgctccagatgagacggaggggaccgctgctcctgtctcgaggaggcttccaccacctaccagccaggcgtcctcggtaatcctagcacctctgccacagggcactaatgcccagttcctgggttgtaaagggctgtgccccagtcccccagcaggccccagtgaacatacgagaaaggatggaggccgctgtctggacactcaggacatggcagcgttttgctgggacagtcatctgcccttcaggaaaaagggtgcaggtgggcaggaggcccttagatgacgccaaggggagccttcgtgggctccacgtggtgtgctccctgcccatccctctgggctcaatgcagttccccaggtggtggtttgggttttcactccagcctcagacttccttcctcagccccagcccccggatgtggtgacagaatcgatactgtaccgacctcagctacccccaacggccgtacaccaggaagaggggctcttctggcagcccccatcctcagccagccctgccatttccagtcctgccagcatcccagccagacaggtggcccttctcttagagctcaaacctaggccttgacttgtcaatcaaaggggtgggtggggcagcttccctcaagcaacttcactctgggatcttgggcaagacgttttgcttctctgaggcttcagcttattctgtgtaaactaaatggtagccactatttgattattagctggggaggagagatcaagcctgacccctgtagcggctggagttttacagcagggcccacccagcacccagtaggtcctcacagatacttgctgggtgactgaatgggtgtgcccacccatcaaagcctgagtgctggaggtggccacccctttccgcgtattatcagagacaaccacctcttactgaactgctgcgtttccaggcaccagtataccatggcatcggctcccaccatcccatgtggggtcagtcctattacagtcccaacagatggagggactgaggctcacagagaagccactcacctaaagtcacatggagagaaagacacgcacacgtactccacatccccaggagacacactctgcatctatgaagtggtatgggtgtgctgtcctccctcggggcagccccacactatcctaaggcggggttggggtgggcggggggatggaccctccccacccatccagttagcgccatgcaccttgcccaccatcgctggagagagacctaaggcgagccccttcctacccatctggaggcctcggtctttccatgtgttaaatgggctggggccgggggacgctctgcagcacccccttccctgggctgggacgcggcggggagggcaggggtgacgctcggagaacagagaggccgaacccagagagcgggccgggacctgataccgatttcccacccgtcccctgccatgggcgccggacgcctgccggagagggctcccctccttaaagggccagtggcctccaagcccgacgcctgcgaccggcggtgggtgatagtgtttcccctccctgtccagccgagggaaaagttaactttccaggcttggctgtgttcagggaaggaactggtctcgcctgcctgccctccatccctcacaccatcccttgtcccggaccctggaggcggaggtccagcccccaactcggaggccccgggcccaccctccccttccgcccccggcccctcggcaggctccgcccctctctgacgtcgccgaggcccgcgccgattggtcgactgcactgtcgctccggacacttcctcctgggccgccgccgccgccgccgacttaaactttggagggggaaaaagagctactggcgcctggcgaccctccctgccccccacccaaccccgctccggcaacgcccccttcctcacggctcccgaccgaacttttctccaacttctgcgactcgtgagattcccttctacccactccggccctcgggacccctctgcccatcccctggccggtcgggtccctgcgaacccctttatctctggaatccactcggtccccgactcagagactcctgccctccacccccaaggtgaattcccccgggccgccttctgagtgggatcctcttcttggagcactggatcctgggattccctctgcccccttctcaatccctcctctagggaaggggcctttgaatcgcgggctctcctgatccctgtgaccccgacctactagatttcctctcaggcttcttggaatctcaatcgctgggacctccaacccactacttttctcctttctgatcttctgggagccctggattccgggcctctgacccactatagtgcctttctctccttcccaggaccccgccatcctcaggtcccctccgcctgccagatcttttctcggatccccgctctcccaccacctgctcacgagatcccgcggatctagaacccagggtcccccggggccccccggccgggtcccgggtgggctccaggcggccggtccccggcctccccccatggccaccgccccctcttatcccgccgggctccctggctctcccgggccggggtctcctccgccccccggcggcctagagctgcagtcgccgccaccgctactgccccagatcccggccccgggttccggggtctcctttcacatccagatcgggctgacccgcgagttcgtgctgttgcccgccgcctccgagctggctcatgtgaagcagctggcctgttccatcgtggaccagaaggtgagggcgcaggctccctggatccagctcggggagaggttgaaggagggggcgctggcagaggggtctggggcctggtgtgcggaagagggaggaaggagacctgagctttgggtgatggagggatagggggcattgcccccctccattgcccctctccccaccatccctttgagagaggactgggcaggggtggggtgccccagaggcctccccaaatttcatgtccctgcatgtcgttgttttctgcagcaaacagggaggaagggaggggccagccaggtgtagagaggggaggaaggggcagcagatgtcggcggacctccacgtccaggcccatcccgggcctcccatttggtggaaacaggagaaattgaacccgggctggccatggtgatccggtgacatgtgtgggtgcaggtgcttgagttagctgccaggggcaagtgaggtctcggagcccaattctgccctcccctaagcctgagatatgtgtggaggggcaggcactcctacagaccctggggactctattccctttcctagtcacagtgctgttagcctactcttaattttggacaccagggtccccagggtgggcagctgggtgttatggcaagaggaaaccaggtggaactccacgtctaaaccgtgaaatgttaaaagaatagtgggcttctgtgttggagtactggactgtagaaatgttagaatattagaatcataacttgttggaatatgcatcctaggcaattaaattgcccccatgttcgtgttcaaatattagaattctaggtttgtgaaatagtaaaacattaaaatgctggaatattagattcctagattgttgaatcctagaaagttaaaatgttagaattttagaatgctggatggatgaggtccttgaatgctaaagaattcaaagagcacagtcctagcttgtcagactcctagaatattaaaatattagattaccgcttatttaggttattgaaatcctaaaatgtatagtgataccaggtaggaatctagaatgtataattctataatgtgagcatgttggagtcccaaaatatccaaattccagaatcttttcagactcctggaaatgaatcctttgggcatcagagaaacgtggggaactgggccagctcccccattctacagacaaggaaactgaagcttagagaaaaacttcccaaggggtcagggccaaggcagtcctggtcttctgtggactctctcttagcagtgagaactgatagggttttgcccaccaaatgcctaaatcccgcaggcccagctcaccaccccaactcagcccacttcatgggaagctggtggcagtgggggtacgggggcagattgtcccttgggtgaacttctttgtccagtgctcaagtccccagcctgccccgctcaggcttcaccccagttttatttttctgccaggtccaggtgtgttagggccgcgtaccttccttcccgaggccccaccggggcagtttcactttctgttctactaggtttcatttcctgcccccaggcccccaaagctgaggacccagacacctgggtcctttgagcattgggtggcaggcgccctccttatctccagcgccctcgagtccaagtcccccggccccccccccccactttcccaggagccccgaaaagtcctccttccagctcgccccaccccagtgctgggcctggagccaggtaactgggacaacaatagacagatccaggaaggaagctggggggcgggtgtgtgagcctggggaggaggcacaggggagggagtgttcattcagcatcccctcccacctccgccaggttccggaaaattcgaggtgtccacgctcccggagccactctccctcccaccccagctcccccttccagccaccaaacccacgccggcgccccctccccgtacaattggggcgctggcatcctgcccggctcgcgctggggttgggagggggcaggcaggaagcgagggcctgcggggtctctgcgtttccgggggaaacagccggccctgccctgggagggtcacagtccgcccgctgctgaaggcggctctgagcttttccgtcgccacatccctctcccgcccctcagttccctgagtgtggcttctacggcctttacgacaagatcctgcttttcaaacatgaccccacgtcggccaacctcctgcagctggtgcgctcgtccggagacatccaggagggcgacctggtggaggtggtgctgtcgggtgagaggtggtggccggcctgggggcggggcctcgggtgggggcggggcatctgggggaggagagggtagggggagttagaagtcaggagaggccgggtgtagtggctcacgcctgtgatcccagcactttgggaggctgagctggagctggggggatcgcttgagcccaggagttcgagatcagcctgggcaacatagtgagattccatctctacccctttctctccctctgaaaaaaaaaaataaggagagttgggggcttctggaagatggttacagagtggggtcatgaaggcgctctttagggactggtctaaactttcatttatggattaggatgctagtgacacgctttgtacagtttgaaaattcattgagctgtgcacttgtgatgtgcggcctttcctgaacatatgttatacttatttatttataaaactagtcaagtgcagtagttagaagggggaaaagaggagaagaaggagttggatctgtaactgactgtgttatgcttaaatataaaggtaaaaaatgggccagctgcagtggctcacacctgtaatcccagcagtttgggaggctgaggtgggaggatcgctggagcccaggagtttgagaccagcctgggcaacataaggagaccccatctcttaaaaaaaaaaaaaaaaaaaaaagttaaccgggcgaggtggcacacgtctgtagtctcagctacttgggaggctgaggtgggaggatttcttgagcttaggagtttgaggctgcagtgagccacgatcatgtcactgcactccagcctgggcaacagagagagaccctatctctaaaaaagaaaaaaagtagaaaaagaaaaaaaaaagttatgatgtccatggctcctgccacgaaaatgctaaattaaatcagaatctctgcaaagtgagatggaatctgcacatcagtatttttaaaagcccccaggtgattttctaagacacagccagaagccagttcatccactcactattccagtagtatagatgggcatgctctcagcaccttagagcagtctatggcccttggtccctcttgagggtgggggcagctgcctttttcatggctgtcttccctgctgctccggcatactgcagtgcccagtgaaaccggctcaatgaatgaatgacagaagtctggatttacacctttagtgaccttgttcaggctttaagtactctttcatatcataagctggcctcacttgaatttttatcttcattgttgtctctcccctaaacctgagttttgttttgtttttgtcatttttattattttttgtttttttagacggagtctcgctctgtcacccaggctggagtgcagtggcgcaaactcagcttgctgcaacctctgcctcctgggttcaagcgattctcctgcctcagcctcccgagtagctgggattacaggcgcctgctaccacacgtggctaatttttgtatttttagtagagacgggatttcaccttgttggccaggctggtctcgaactgctgatcttaagtgatctgcccacctcagcctcccaaagtgctgcgattacaggtgtgagccaccgctcccggccctgttattttgttttgaggcagggtcttgttctgtcacccaggctggaatgcagtggcatgaccaccactcactgcagcctctacctcccagactgaagcaatcatcccgcctcagcctcctgaggtggctggactataggcattacaggcatgcaccaccacactgggctttttttttttttcttttttttagacagaatcttactctgtcacccaggctggagtgccgtggcatgatcttggctcacggcaacctctgcctcccgggttcaagcaattctcctgcctcagcctcctgagtagctgggattacaggcacgcggcaccaggcctggctaatttttgtatttttagtagagacggggtttcatcatgttggccaggctggtttcgaacttctgacctcaagtgatccgcccacctgggcctcccaaagtgctgggattacagatgtgagccaccgggcaccgcctatccatgttcttttttgttgttggtggtggtatttttaattaaaaattttttaatttggtaaaatatacataacataaaaattactattttaggccgggtgcagtggctcacgcctgtaatcccaacactttgagagaccgaggcgggcagatcacctgaggtcgggagtttgagaccatcctggccaacatggtgaaactccgtctctactaaaaatacaaaaattagtcgggtgtggtggcgcatgcctgtaatcccagctactctggaggctgaggcaggagaactgcttgaacccgggaggcggacttgtggtgagccgagatctcactactgtactccagcctgggtgacagagtgaaactctctaacaaacacaaacaaaaaagcccacaacattttaagcacttttaagcgtacagttcagtaatttaaagttcacgcacactgttgtgcagccggtctccagaactgttgtcatcttgcgaaactgaagctccttgcccgttaaacaactccccaattcccgctctgtccctgcccagggcgtagggatatatgtgttttgttcaggggtggagctgggatttgaacccaggcagaatgtagtatgagagcaaatgaaggaaggaaggaaagatcacaccttgcggctgggagcactgtgagaaatcagggaacgtggggtctggaaaagctttggcctaccccgcctcaagcatccacccctattttccgcctacagcctcggccaccttcgaggacttccagatccgcccgcacgccctcacggtgcactcctatcgggcgcctgccttctgtgatcactgcggggagatgctcttcggcctagtgcgccagggcctcaagtgcgatggtgagagctaaagggttgggggcggggcctggggcggggctctgcaccgggggcggagcgtaatggtcctggcacggggacagcgtggggaggaggagcgggtctcagagctgggggcgcagcctaggaagtaataatgggaagaaggatgggcccagaagcagagcttggggaaggagtggtggggctgggccggggctcaggtctaggggcggagcctaggaggtggagctgggagggacaagtaggggcttaagaacagagcctaggggagcagaagggtggcgggggaagagggtggggcctctatcagttagggatcaagcagagaaacatccaggaggagatatatattgagatatttatatgcaaggaatcagcttacagaattgtgtgggctggctaggcaactcaaatctggctgggcacagtgggggaggccagtaatcccagcactttgggaggcaaaggtaggtggatcacttgaggccaggagttcaagaccagcctgggcaacatagcaagactctgcctgtacaaaaaataattagccaagcatggtgacagacacttgtggtcccagccacttgggaggctgaggcgggaggatcacttgagcctgggagctcgacactgtagtgagccctgattgcaccactgcacaccagcctgggtgacagagcgagaccctggctcaaaaacaggaaaaaggccggacacggtggctcatgcctgtaatcccagcactttgggaggccgaggcgggtggatcacgaggtcaggagattgagaccctcctggctaacatggtgaaaccccgtctctactaaaaatacaaaaaattagccggacgtggtggcacacgcctgtagtcccagctacttgggaggctgaggcaggagaattgcttggacctgagaggaggaggttgcagtgagccgagattgtgccactgcactccagcctggtgatagagtgagactccttctgaaaacagaaacaaaaacaaaacaataaaaagaaaaagaaaaaaaaatccatcctatcaggaagggcaagtgggaactcaggcacaagctgaagctgatgtccacaggtggaatttcttcatccgaaaagtctctgatctgctttttaaaacattcagctgattgaatgagacccacctagaacaagcaggatcacctctcccacttacagtcagctgattatggattttcatcacatccagaaaatacctccactgggccgggtgcggtggctcacgcctgtaatcccagcactctgggaggccgaggcaggtgaatcacctgaggtcaggagttcgagaccagcctgtccaacatggtgaaaccccgtctctactaaaaatacaaaaaagccggcgtgttggtggacgcctgtaattccagctactcgggaggctcagtcaggagaatctcttgaacccgggaggcagagcttgcagtgagctgagattgcaccattacactccagcctgggcaacaagagcaaaactctgtctcaaaaaaatgaaaagaaaagaaaatacctccatggggccttctcttcccagttcttcctggagtcggggaaaagctgggttgagaaggtgaaaagaaaaaacaaaccttgactgggcacagtggttcacacctgtaaccccagcactttggaggctgaggcaggcggatcatgaggtcaagagattgagaccaccctggccaacatggtgaaaccccatctctcctaaaaatacaaaaattagcgggcgtggtggcatgtgcctatagtcccagctacttgggaggctgaggtaggagaatcacttgaacccaggagacagaggttgcagtgagccgagatcgtgccactgcactccagcctggcaacagagcgagactccgtctcaaaaaaaaaaaaaaaaaaaaaaaacacaaacaaaccaaccttcatggcaacatctagattagtgtctgaataactgtggatctcgcctagccaagctgacacattaacatgactatcagggtccatctcttgtcaacctggcacctgtcttagtttgtcagggctgccttaacaaaataccaccctgcgtggcttaaatgacagacatttacttctcaaaatccctggaattgtgagaggctggaaagacaaagatccagattctggcagggttctgtttctggtgtagcctgctttcctgccttgcagagggccatcatttcactgtgcgctcacatgggacacggagagagagatccctggtatctcttccctttataaggaaggccaggcatggtggctcatgcctataatcccagcactttgggaggatggtggatcgcttgagtccaggagttcgagaccagcatgggcgacatggtgaaaccccgtctctaaaaaatacaacaaattggccaggcatggtggtgcatacctctagtcctagctactcaagaggctgaggtgggaggatcacctgggcctgggaggttgaggctgcggtgagccgtgatcatgccactgcactccagcctaggtgacagaacacgattgtctcaggaaaaaaaaaaaaaaaaaaaaaaaaaaggtcaccagtcccattggattacagccacactctttcggcctcaattaaccttaattacctccataaaggcaccgtctccagatatagttgcattggaggttagggtttcaacataagaattttgggggagacacagacatttagtccataacagcacccatacatatctccttaaatcatagtttaaaaatatacaggttttcttttttggagacagcgtctcagtctgtcacccaggctggagtgcagtggcgcgatctcagctcaccacaacctccacttcccaggctcaagcgattctcctgcctcagcctaccgagtagctgggattacaggcacacaccattactgcccggctaatttttgtatttctagtagagacggggtttcaccacgttggccaggctggtcttgaactcctgacctcaaatgatccacccgccttgccctcccacagtgctgggattacaggcatgagccaccgcgcctgtccaaaacatacagttctttaagccaagatgtctcaaggttcagcccaagtgtcaagatctatataggtcctctgtccctgttattcatgcttctgagtgagaatgttgaaatcggggctctgcctacagatgaaggccatgtacctgcattggctatgaggacagatgacaggtgaggaccatccattctgtgatgagaccctgtggctccatttttttgtgtgtgtgagacagagtcttgctccgtcacccaggatggagtgcagtggcgtggtcttggctcactgcaacctctacctcctgggttcaagcaattctcctgcttcagcctcccaaatagctgggattacaggtgcgcaccaccactcctggctaatttttgtatttttagtagacggggtttcaccatgttggccaggctggtttcaagtaatccaccctcctcagcctccccaagtgctgggattacagacatgagccactgcgctgggccccatgcgcctccatttttgtatggtgtgccctgcaattagagccatattcttggatgttccattgggtattaggtctgagacagcatctctagctccgtgggtgccacgcttgtacagaaatcctgattctgggccaggcacggtggctcacacctgtaatcccagcactttgggaggccaaggcgggcggatcatgaggtcaggagttagagaccagcctggccaacatggtgaaaccctgtctctactaaaactagaaaaattagctgggtgtggtggcgggtacctataatcccagctactcgggaggctgaggcaggagaatcatttgaacctgagggggtggaggttgcagtgagccgagatcataccattgcactccagcctgggtgacagggtgagactccgtctcaaaaaaaaaaaaaaaaaagaaatccagtttctccaatatcctgtgttccagatcatcatgcagtccaaagtatacttgtattatttaaggactctaggcctgcagatactgattcagtgcattaaaagctcttataaatattgccatcgtccacacaccatatccaactcttgaggtctcagcatatgcagtctttgtcatgatacagccctggtgtcatcaagtcctaatgggttatcagcacagacttcactggtgcagcatcacagatgatggtcccagttcctatggtggcaagagaaccccaaatgactacattccgacaggagtttaactctatcctgagactcattctgagagttatagataagattctgaaattctggaaggcacatgagtgattcaaggccaacactgggaaatggttcctgtgtgcaaagaccatttgccctgctgaagctcttcttgcagggccaacaccgttctccaagcttgcctccgtgattacagcatgcagccaagacagtgcctacaatgaggaggtgtggaactggaaagcctggagcaggcgggtaccagaagggctcccaaaggctggaggaacattcttcactccagaatagaaagcgatcctggaatcgtttggaatcactggagatgtattagagcacacatacagaacgtccagtgggaaacagggagttgagctgatttctccatggatgaggattttaaaagataaaataggcagggcacagtggctcatgcctgtaatcccaacactttgggaggctgaggtgggaggatcacttgagcccaggagttcaagaccagcctgggcaatgtagcgagaccccatctctacaaaaaaataaaaataaaaaaattatctgggcatggtagtgtatgtctgtggttctggctactcaggaggctgaggcaggaggattacttgagcccaggagttgaaggctgcagtgagctatgattgtgccattgtgcttcagccgggggtacagggagatcctgtctctacaaaataaaataagacaataagaagtcatacttctgcctagtatggtacaatggacctgagtacaactgagaactctttttttttttttgaaactgagtctcgctgtattgcccaggctggagtgcagtggcgtgatctcagctcactacaacctctgcctcctgggttcaagtgattctcctgcctcagcctccggagtagctgggattacaggcgtgtgccactacacccggctaagttttgtatttttagtagagatggggttttgccatgttggccagtgtggtctcaaactcctgacctcaagtgatccgccggccttggcctcccaaagtgctgggattacaggcgtgagccaccatgcgtggcccacactactaagatttaatcacactacttagggattgcctggattccaggtctacagaaaagagaaagtggggtacagggggtgagcagacctggagggatagtgaccttaggggtgggggtgaggagaggcattttcttttggaaagttggggttggggaaagagggggaaccaaaggggcctcagaaaaaggaaggtcagggttagaagggggaacaggtgtctctagggagatggacaggagttttggggaggactagaaggaggtgcttaccatagaggactggggctgggtcagagctttggcggggacttttgaggcatccattgttgcagtgggaaaaggtggggtgtgaggcgcgttcagggcctggggggcagatggggtgatgtcggggctacaagctggaactaggggtggagctttggagggaacctttgaggtatcccttgttggagtgggaaaattttgggtgtgaggcgtgttcagggtctgggggacagatggggtgatggcagggctacaagctgaaactggggacagagctttggggggagcctttgaggtgtcccttgttggagtgagaaaaggggtgtgggtgtgttcagggtctgggggacagatggggtgatggtggggctacaagctggaacttggggcagaactctaaggaggggtgggcctgaaggggctgatacacttacggatagtagtgccttttggaggagatcgtgctggcggggggtgatgggacaggaccaggtgagagattgggtggaaagggcacaacttctcaagaagagacctaggaggggcagacgccatgtctcttactctctggcgccccctgcaggctgcgggctgaactaccacaagcgctgtgccttcagcatccccaacaactgtagtggggcccgcaaacggcgcctgtcatccacgtctctggccagtggccactcggtgcgcctcggcacctccgagtccctgccctgcacggctgaagagctggtgaggagatgggggatgggacgggttggtggctaggggggtgacttggcccaggcatggggccaacgcactgatgtgtcccctccattcttgccaacgacagagccgtagcaccaccgaactcctgcctcgccgtcccccgtcatcctcttcctcctcttctgcctcatcgtatacgggccgccccattgagctggacaagatgctgctctccaaggtcaaggtgccgcacaccttcctcatccacagctatacacggcccaccgtttgccaggcttgcaagaaactcctcaagggcctcttccggcagggcctgcaatgcaaaggttagctgggcctgtcggggaggacagacagggtcagaacctccttcccgccccaacctggtcttgtggcaggacacaaggatctgagccttgggaccccagggcctcagaaggggagggccctgaatcctagtgttctgggacctttggaattctggaatcttagaacctcagttgtgtgtgtgtgtgtgtgtgtgtgtgtgtgtgtgttgtgttgttttttggagacagggtgtcactctatcacccaggctggagtgcagtggcgcaatcacggctcactgcagcttcaacctcctgggttcaagtgatcctcctgcctcagcctcccaagtagctaggactacaggtggtgccaccacacccagctaattttcttttcttttttttttttttgagacggagtctcactctgtcgcccaggctggagtgcagtggtgtgatctcggctcactgcaaactctgcctcctgggatcaggacattctcctgcctcagcctcctgagtagctgggactacaggcgcccgccaccatgcctggctaatttttttgtatttttagtagagacggggtttcaccatgttagctaggatggtctcgatctcctgaccttgtgatccacctgcctcgacctcccaaaatgccgggattacaggcgtgagccaccgcgcctggccacacccagctaatttttaaatcatttgtagagagaaggtatcactatattgttcaggctggtcttgaactcctgggctcaagcaatcctcctacctcggcctcccaaagtgctgggattacaggtgtgagccaccgcgcccagctgaacctcagtctttagaaccttggaatcctagattcataacgtgcttagcatggaattctaaaactgtagaacctgagaattctagaatcagaaccatagcattcaagaattccgaatgatagaattcagctaaaataacaacagaactttagattacacatcttagatctcccaagttatagactctcagagcatgagaattttggaaccatgggatttgagggtaatagaaacataggcacatcaaatttgagagtcttagacgtctagaatcatataagcttgaaaccatcgtaacctagaatcctggaaattctagactcccagaactttgaacaatcaaattctagaatccagccaggtgtggtggctcatgcatgtaatctcagcactttgggaggccaaggtaggtggatcacttgagcctaggagtttaagaccagcctgggcaacatggtgaaaccctgtctctacaaaaaaaattaaaaattagccaggcatggcagcatgcatctgtggttccagctacttgggactctgaggagggaggattgcttgagcccaggaggttgaggctgcagtgagccatgattgtgccactgcattccagcctgggtgacagagcaagaacttgtctcaaaaaaagaaaaaaaaaaattctagaacctcagaagcctagatccacataaacttagaaacatccaattcaagaatttactggaacaatcaaattctagaatcttagaagcctagagctaaagaagcatagaaacatcaaattctagaatcttgtatgtatagaatcctagaaccttggaatctgcagattctggaggtagagaagcctagaattgtagaaccctagaactgtcaaattttagagtttagatatataacaccctaaaatcttggacattaaagagtcttagaagtgttgactcatagatgtctagagttctagaaacttggacatcaaactctgaagccttagaaatacggaatcaggtcaggggcagtagctcacacctgtaatcccagcactttgggaggcttaggtgggtggattgcttgagcccaggagttcaagaccagcttgtacaacatggaaagaccccatctctacaaaaaatacgaaaaattagccaggcatggtagtgcgtgcctgtagtttcagctactcaggaggctgaggtgggaagatcgcttgagcctgggaggcagaggttgcagtgagccgagatggtgccattgcacactctagtctgggtgacagccagactgtttcttaaaaaaaaaaaaaaaaaacaaaaaacagaatcatagaaccttcataaaataggtttttagtaaactctagaatcttcgatgtatagtgtccctagaaccgtggaaacactgaactctacagcaatggttctcgaccaggggccgttttgctcctaggggatgtttggcaagggttggagatggttttgtttggtacgctgggatagtgctactggcatccagtaggtagaagtcagagatgcagctaaacatcctacaatacacagagcaagtgccctaaaacaaggaattatcctgggcactgtgttagtgtcacgggttgaggaacccagccctagggtgttcagagtctggagtcacagcacattagaaccaataacacacacacacacacacacacacaagtcgggcgcggtggctcacgcctgtaatcccagcacttttaggaggccaaggcaggtggatcatctgaggtcaggagcgcgaaaccagcctgaccaacatggcgaaaccccgtctctactaaaaacacaaaaaaatcagctgggcgtggtagtgggcgcctgtagtcccacgcccagctaatttttgtatttttagtagagacgaggttttaccatgtagggcaggctggtttcgaactcctgacctcaaatgatctgctctccccggcctcccaaaataccgagattacaggcgggagccactgcacccagcagtcgtcgggattttgagtctagccctcctacttaatcaagacccccccgatggttgggaaaactgtggctgaaagtgggaaaatgaccagggcagcagcagccagtgttcttacccagacagcaagagtagactcttttgagcctgaggcttagggtcaaggttcaagccttccaggtaacctctcttccccttctcacccgttcccttgttccctgtcctaccagactgcaagtttaactgtcacaaacgctgcgccacccgcgtccctaatgactgcctgggggaggcccttatcaatggaggtgagaggctggggggatgctggggagaaaggggaaggggcaggactgggtggagacccctctgatgcctccgtccccacagatgtgccgatggaggaggccaccgatttcagcgaggctgacaagagcgccctcatggatgagtcagaggactccggtgtcatccctggctcccactcagagaatgcgctccacgccagtgaggaggaggaaggcgagggaggcaaggcccagaggtatacacagaaccctccaagagaccctgggggaagaccctcctgcacagtgaacctcaatttctttttctctacaatgggctgacatcacctcatatttataaattttcccagttcctgaggcaaaccttttaaagcactacaattttttttaaataattttttgtttgagacagggtctcggtctgtcgcccaggctggtgcagtggtgcagtcttgactcactgcagcctcgaccacctgggctcaagcgatcctgccaccttagcctctcgagtagctgggaccacaggctcgtccaccacacccagctaatttttgtatttctgtagagacagggtctaccctatgttgcccaggctggtcttgaactcctgactcctgagctcaagtgatccacccgcctcagcctcccaaagggtcttgctttgttgcccactggagtgcagtggtgtgattgtggctcactgtaacctcaaactcctgggctcaggtgatcctcctgcctcagcctcccgagtatctgggactacagggatgcactgctatccctggctaattttagacggcgtttcgctcttgttgcccaggctggagtgcagtgatgcaatttcagttcattgcaacctctgtctcctgggttcaagcgattctcctgcctcagcctcccaagtagctgggactacaggcacccgcccaggcccagctactttttttgtatttttagtagagacagggttttgccatgttggtcaggctggtcttgaactcccaacctcaggtaatccacctgcctcggcctcccaaagtgctgggattacaggcatgagccaccgcgcctgacctatattcctcttcttttttttttttttttttttttaagatagggggtcttgctatgttgcccagggtggtcttgaacttctgcgctcaagcaatcctcccacctcagcctcccaaagttctgggattacaggtgtgtgccactgtgcccccagcctacacatttttaaactatacacggagttcatacttagtcagctccactggaatgtgagctcaggtgcatgagggcaaggatattttctgccctcccaggtgcctaggacaggactggctcagatcaggcacttcctatctgggtgtggcgtgaatgtttattgagaaagcacagttcacacaggcgctggagggtgacagcccagatcccagctctaccacttcacttgctaggcgcttccctgtgtgccacggtttcctcctggggcgatgaggtacctaccccacggggtgataaacctggggtaggggtaagggggcaccctcacaggtgcactggaaaatatttaatgagcacctgctgtgttcaagcacacagctatgaacaaaagaggtaaaagtctgcccttctggagctgactgcctcagtggggagacagctaataaatgcatccatagcatcgggtattggtaatggtgataaaaacaagaggagatggagaatgggggacatgctatcttagggtccttcaaggagacctcgctgaggaagtggcagttgaagggaggggagggaaggagccttgtggggctctgggggaaaaggcttccaggcagaggcaacagcgagtgcaaaggccctggggtggaggcaccgtgttccagggacagcaaagagacccatgtagctgcagcagggagggcgaggggaagagggttggacagaaaggggatgggtaagccagtcacagtgacgacagagtgtttcctgcggtgcctcccaacccaagcagcctgaagccgcaggttccctttctcccacgtctttcctgggaatgcctagtaacaccgtcatacactgtcaagagttggaccttgagggattgggggtggcgggtgtggggagaggcagcccatttcacagatggggaaactgagtctcaggcaaagagatgtgatcaaggccacccaggttctgatctagcacagggatccagagattgttggttccagagttgagcaagtcacttaatctctcaaatctcaaactcctgacctcaagtgatccccccacttctgcctcccaaagtgttgggattacaggcatgagccaccatgcccagcaggccacttaatctctgtagaccttccttactgtactaacagcatctgcacaaatgagggaggtgaggcccagagaggttgaatcacttacccagtgtcacacagctggctccacaattgctggactaaataccaattagcacttactggaggtcctctgtatgccaggcactgtactaagctccgtagaaaggtttccattcctcatagcatcccctttgggtggacaaactgaggcatgaagaggttaggtaatttgctaggcagcctgacttcagaaaggcctactacagaagccctctcaagaatctccttctgggccagcgtggtggctcacacctgtaagcactctgggaggccgaggcggatggatctcgtgaacggattctaagggtgggactaggggcaggagttagggaaggagttgaggcaaagagttcgagaccagcctggccaacatggtgaaacctcatcactactaaaaatacaaaaattagccaggggtggtggcgtgcacctaatggtcaccgtgattgtcccggccactcaggaggctgaggcacgagaatcgcttgaacccgggaggcagaggttgcagtgagccgagatcgcaccactgcattccagcctgggtgacagagcgagcctcttaaaaacaaacaaaaagcaactcccgggtgtgtgttggggggaaaatgtcaaaacaaaccaaacaaacaaaaacagtccccaactccctagtttcccagagatgccccctgcattcccaagcagcatggtcactttctgcatgtgacttctcaccccttcctcttccttcgcagctccctggggtacatccccctaatgagggtggtgcaatcggtgcgacacacgacgcggaaatccagcaccacgctgcgggagggttgggtggttcattacagcaacaaggacacgctggtgagtggccggggcggggccgggtacggcggagcgaaggctggaagaggggcggctcagcttgagtaggcggggctaggtgggtggggctggagctaggcgcgagcggggccagtagtgggctgggccgtgctggaggcggggctagaattagaagtgtgggctgtaagggtgggactacgggcaggagttagggaagacccggggctcagggcaaggtcaggggcggggctagagttaggggaggagcttggctggaggaagagggctaagtgggggcgagtctggggttagggcgtgggggctgggctagggttaaggctaggggcggggctggggttagggcgtgtggtggggtggggttacggcgtggggtaggtgctagagttacggcgtgcacgtggtgctccaggcacctggagccccaagcagctccacgggatagggactgggcaggaaagtctggcggttcacgtgactcttcaaacatctctgcagagaaagcggcactattggcgcctggactgcaagtgtatcacgctcttccagaacaacacgaccaacagatactataaggtaagcctccgggctttcagctccctcggacttcccgctgtgcccacaaactttcccacacctcctcctacccccagttactccagacagatcctgcaaatcacaccctctgcccacccccagcctccctgcttccagctcatcagcaagtgctgcccatccgattctggccccaccactttccagccagggggactccgggcaggttcccttacttctcagtgcctcacgcttctcacctgcaaaatgcctcaaatgctaatactcacctcagggctggtgcgagaattcaaagagccaatccactaaaccaattggcttaaggcgtggtatatattaagctcccagtaattctaaggctgttctcactattcctttattttttgttatttatttattttttgagacagagtctcactctgtcgcccagctggagtgcagtggcgcgatctcggctcactgcaacctccgcttcccgggttcaagcgattctcctgcctcagcctcccaccctaggactacaggtgaatgccaccacacccagctaatttttgtatttttagtagagacggggtttcaccatgttggacaggatggtcttgatctcttgacctcatgatctgcccccctcggcctcccaaagtgctgggattacaggcatgagccaccgcacccggcctcactatttctttataattaatgtattgcattgtgtgcgtattcgtcaccacctcccatgcccacactgtgtcccagccactgtcttccacctggatggtttcagccttctccttgcagggtccttgcttctgacctcacaacctctgtcatttcccccacagccaggggagtcttcattaaaaccgtcaaaccccccagtggctcccattgtcttagagtaataaaacctggactccagctgttacctgccctggagcgtcttccttgaactttccatggctggttccttatcatcttcccattttgctcagaccacaccatctaaaatgctgtccttggccaggcgtggtggctcacgcctgtaatcccagcgctttcagaggccgaggtgggcggatcacttgagatcatgagttcgaaaccagcctggccaatatggtgaaaccttgtctgtactaaaaatacaaaaattagctgggcatggtggcgggtgcctataaccccagctacttgggaggctgaggcaggagaattgcttgaacctgggaggtggaggttgcagtgagctgagatcgcgtcactgcactcctgcctgggcaacagagcaagactccatctcaaaaaaataaaataaaataaaatataatgctgtcctcaccatgcccccccgacgtgtccatgtcatcacctggttttatgggctgcctaagtcattcattctttcctctctcctacctccctccttcctcttttgacacgtttcccaccccatagtccctgtgccttctgtcccgcctgggtcccctcagcctccttcctggttctctgtctccatctcattctattccatctgccctccgcacacaagcggatgatgctcaaaagccttcagtggcttcctagggcccttggacaaagcccaggctcttccttgtggcccgcaaagccctgtgtggcctcatttcctccatttattatcaaacgtttatttttgagacggagtctcgctctgtcacccaggctggagtgcagtggcgcgatcttggctcactgcaacctccgcctccggggttcaagtgattcttctgcctcagcctcccaagtagctaggattataggtgtgccaccacgcctggctaatttttgtatttttagtagagatgggctttcaccatgttggtcaggcgggtctcgaactcctgactttgtgatccgcctgccttggcctcccaaagtgttgggattacaggcatgagccaccatgcccagcccatttatttattttgagacaggctcttgccctgtctcccaggtgcagtggcatgatcatggctcactgtaacctctgcctccctggctcaaatgattctcccacctccacagtagctgggattacaggtgcgcaccaccacacctggctagtttttttattttttgtagagatgggggtctcattgtgttgctctggctggtctcaaactcctgggctccagcgatctgcctgccttggcctcccaaagtgctgggattacaggcttgtggcaccatgcctaatttttaaattttttgtagagctggggtctcactgtgttgcccaggctggtcttgaactcctgggccatctgcccacctcggcctcccaaagtgctgggagtacaggcacgagccaccacatccggccatcaaatgtttatcaagcttttactatgtccaggcaccgcccatgtgatggggatacagcttggcttttgagcatagcctttccttagggcctttgcacatgctgttcccctactccttgccaactggctgcttcttacctttctggtctctgcttcaatatcacttctgccagtaattagtattattattattatttttgagacggaatctcactctgtcgcccaggctggagtgcagtggtgcgatcttggctcattacaaccaccgcctcccaggtgcaagcgattttcctgcctcagcctcccgattagctgggattacaggcgcacaccaccacgcctggctaatttttgtattttcagtagagacgggattttgccatgttggccaggctggtctcgaactcctgacctcaagtgagctgcccacctcggccttccaaagtgttgggattacaggcatgagccaccgcacctggcctctgccagtaattataaaagaacagtgagaacaggcttagaattactgggaacttgtctgaccactgtgcaaaccaggcccatccctatcaacatggatcccgtgtatccttctgggtaagcactagaattccaaggtctgcctggcatcctcacctgtgctggttccacgtcctgcaggaaattccgctgtcagaaatcctcacggtggagtccgcccagaacttcagccttgtgccgccgggcaccaacccacactgctttgagatcgtcactgccaatgccacctacttcgtgggcgagatgcctggcgggactccgggtgggccaagtgggcagggggctgaggccgcccggggctgggagacagccatccgccaggccctgatgcccgtcatccttcaggacgcacccagcgccccaggccacgcgccccacagtaagtcctcccacctcgggtccttgagagaatagatctagatgggtggggcacggttctggggaatggaagggccaaagaggaaagtgggcaatggtggggttgagaacgcagcttctggactcagcaggcctgggttcaaactctgttaatcactcctgttaatcccagcgctttgggaagccaaggagggaggatcacttgaggccaggagttcaagaccagcctgggcaacataatgagattccatctctacaaaaaataaaaacaattagccaggtgtggtggtgcacacctgtagttccaggtacttggaaggctgaggcaggagaattgcttgagcctgggagtagtgagtcatgattgcatcactgcactccagtctgggtgacagagcaagactctgtctccaaaacagaaaaaacaacaacaacaaaaatccacaacaaatctctgttaagctcctggcctgatatgtggccctgggcatatcacttcccctccatgagccttgtcccaggtgctgataagtcctcatgcacttactgagtgcctcctctgtgcgggacagtgctggggacccagtggtggccaggacagcccaagacctgccctcatggggctcagagtccagtagggcagaatacccatcttcagagagtgacagtccagggtgggcagggttgggacaaggaagctagggagctggaggagcccagaggggtacctgacccaatctgggtatataggggggcttcctggaggaggtgacatctgaactgagatctggaggccgaggcagggtgagatgtgggaaagaaaatgggaggtcattttaggcagaggcaaaaaatgttgagagagtaccaggttcccaccctctggagcttataatccagtgtgggtgacagacattgatcattaacccatacaagcaacgagtgtgatgcagagcatttgcgagagtaatccaacttggtcctaggagtgacatttgagcttacacttgaggatgaggaggatttagctaagtctaggatgaaggaaagagtattcctggcaggggaaacagcatatgcagagaccagaaggcagaagagagtttgctgtatttgaggccgagcaaggaggccagtgtgtcaggaatagcatgttgggggtagaagtcagaggtagatgagggtctaggccatggcttttaggccatttaaggggctcaggcttcttcctgagggcactggggagccatggcagagttgtgagcagaggagggacagggtcagtcttgtgcctcagtaagatccctctggtttctctgtgggaggtgagtaggaaggggcaggattggggcaaggagaccagggaaggggctgtggggtgaggacccagagttggggggcgagcaggggcctagactggtggaagagagagacattcaaatggcagaaggatcggactttagaaatgtctggctctggttgggtttgtagggggaaaagttcaagggaagatgcaggagtcagtctgggctttccctccaagactcagtttccttctctgtacaatggggtcagtctgcctcccctggtgctgagatcctggggtaaaatgctcagcaaaatcatctgtaacatcactcctttagccactcagcacatctcatttactcctcctggtggctctatgagggaggtccttttattattcccattttctagatgaggaaactgaggttcgtagtggacaagtcaccagcctgaagttgcacattgtatcgaacattggattcaaatctgggtggcctgactcccaagtctgcttttgcaggtatgggtggagataatcctgagcctggagtcccctcacctctgtctctcccctctccctaggacaagcttctctgagcatctctgtgtccaacagtcagatccaagagaatgtggtgagactcctgcccccacctgatgccctcccctcccacaaaccctcctcagctctctcgtctccttgactcccccttccccatttccatttgcacccctgacctgccctgtcttcaccctgtaggacattgccactgtctaccagatcttccctgacgaagtgctgggctcagggcagtttggagtggtctatggaggtgaggacacttcagagctaacccagagggagccccgggctgggggaagctgctgtggctccagccctttctttctggctccaacccttcctttctgattggtcacatgctcacctcccatgttgattggcttagctagatcctgggtggactgattgcaggttctccttttctcattgggaaaaaccaatggacattcctcctgttattaataggaagggtaaattcggcactctgattggtcacagaggtagattttgattggatagggaaggtagattctgcactctgattgaccacagagctagaacctagattctgattggatagagtagattctgcattcatattggccacagaactagttcctagattctgattggaaaagagggtagattctgcactctggccacagagctagatcctagattctgattgaataggagggtagattctgcattctgattggccacaggtctagatcctagattctgattggattggagggtagattctgcattctgattggccacaggctaaatcctagattctgattgtatggggcgggtggtaaattttacactttgatttgccacagagctagatcctagagttcaataggacagggagggtaacttctacactctaaactctaagactcagtttccttctctgtataatagggtcagtctgcctcccctggtgctggtgtctctcccctgtccccaggactcttatgggtcacacaaaactagatgctagattccgactggttataaatccagtttcccatgttatacattcccttcttcggagctttttgtttgttttttgctttccttctttctgcctttactcccaaggtgcacctcaggtggccttttcacgtatctcctggggccttccaactctgcccaactctggctgtctccatggtggggggcagaggttggcagaggtggagatactcctgccaggactgggtggtcttgctctctcatcccccatctcttctactccctgtgcaggaaaacaccggaagacaggccgggacgtggcagttaaggtcattgacaaactgcgcttccctaccaagcaggagagccagctccggaatgaagtggccattctgcaggtaaccaccaggccgccttccctttctgcttcttcctttcatgggccagctgacccagtgtaggggtggtcagggaaggcttcctgggggagggcatgtgcatgttgagactgaaggggagaaggtgttcttagcagagggaccagcctgtacaaagacctggtgagagggagcatgaggttttctagaaaggaggtactgggagatgaggccagggaggagggcggagccagaccctttggactttctcctgagggtactggagagccacagaaggcttttgagcaagggaggggcaggatcaggtgtgtacgttaggaaaatcccgcaggctgccatctggagggtgggtggaaagggaagtgattgtagccaggaggctgagtggggatctgggtgggagagaggggttaggccaggataggactggagaatgtgagagggggtatggatttaaaagatacagatgtgcagagctctccccatttctccaagctccccctcctccctcctgcaaccctgggcctccaccagaatttcaggatgtaaagatccttctgggccgggcatggtggctcacgcctgtaatcccagcactttgggaggctgaggtgggaggatcacttgaggccagaagtttgagaccagcctggccaacatggcgaaaccccatctctatatttaaatagaaagaaaaaaaagatccttctgggcacctggcaggtggggtggaggtgggcctgttctgtcttggcctgtgggaagcccccttccctctccaagtgccaataccccagggacatccttctccttgtttgtcatcctcctgctcctatacctgacccgttggggtctgagtttgtgggttacctgggccctgaccccgctccccaccctgcagagcctgcggcatcccgggatcgtgaacctggagtgcatgttcgagacgcctgagaaagtgtttgtggtgatggagaagctgcatggggacatgttggagatgatcctgtccagtgagaagggccggctgcctgagcgcctcaccaagttcctcatcacccaggtgcgtctgccctgcccgctgccacccgcccctccccatcaggtgtcagcttggagaggccctgtatgcctagggggtcaagcagacacttgggggagtcacaatagcagataacagaaaccatcatcaggctgggcgcagtggctcacacccgtaatcccagcactttgggaggcccacgaggtcaggagatcgaaaccatcctggctaacatggtgaaaccctgtctctactagaaatacaaaaaattagccgggcatggtggcaggcgcctgtagtcccagctactcgggaggctgaggcaggagaatggtgtgaacctgggagatggagcttgcagtgagccgagatcgcgccactgcactccagcccgggcgacagagcaagactccatctcaagaaaaaaaaaaaaaaaaaaaaggaaccataatcgtacagaagtaataataaccataatagaaaaaataagccgggcatggtagcacgtgtctgtggtctcagctactcaggaggctgaggcaggaggatcacttgatcccaggagttctgtgctgatcaggtgtcctcattaagtttggcatccatgtggtgacctcccaggagtgggggaccaccaggttgcaaagcagcccaggttggaaatggagcaggtcaaagctctcttactgatcagtagtgggatcacatctgtgaagaggcattgcactccagcctgggcaacatagcgagaccccgcctctaaaaagaaagaaagaaaaaagaaaaataatagtgacaataacaattaaaaataaagagtatgccaggcgcggtggctcacgcctgtaatcccaacactttgggaggccaaggcgggtggatcacctgaggtcaggagtttgagaccagcctggccaacatggtgaaaccctgtctctactaaaaatacaaaaattagctgagcatggtggcaggcacctgtaatcatagctacttgggaggctgaggcaggagaatcccttgagcccaggaggcagaggttacagtgagctgagatcgtgccattgtactccagcctgggggacaagagtgaaacttcgtctcaaaaaaaaaaaaaataataataataataataaagagtaatcataataatagaaaaaaatagactagcggtaatgatagctatttttattataaaaaataaatgatcagtcaggctccctggacctgacttgactcatctagaaaaaaggggagtcaggcatggtggggtacacctgtaatcccagctactcaggaagctaaggccagaggattgcttaagcccaggagtttgagccagcctgggcaacatagcaagagcccatctcaaaaacaggctggctcatgcccgtaatcccagcgctttgggaggccaaggcaagaggatcgcttgaagccaggagttggagaccagcctaggcgacatagtgagatcccacctctacaaaaagtaaaaaaaaaaatagaaaacctagctggatgtggtgcctggtagcacatgtctgtagtcctagctgcttgggaggaagggagtggagaggctctcttgaacctaggtggttgaggctgcagtgagctatgaccgtgccactgcactccagcctgggtgacagagcgagaccgtgtctcaaaaccaaacaatagaaaaaacgggcaagcagccctttttctctcattcattcattcagttggtcaacaaacactccctagtccctgctctgtgcttggtcccttgctggtcagtgttgaggacacagggatgaccaatacagccccattcttagacagtgatagctcaggtgagcagggctaggacaagggaggctgataatggtgatgataaataatgtggtcactaacatttattgagcacttactatgtgccaagcactcttcaaactcatttaatcttcatagtaacctgtgcagtaggtgctattattatcaatccccttttatggttgaagaaactgagggtcagagacatcaaatatcttgtccagggtcacatagctggtgggatttgaacctaggatctttgcttttaactagtgatgtcaaactcatttgtgttacattcaaacagattttccttgtgtgcctgtgtgcctgtgctttttgtttgtttttttgagacagggtctcgctctgtcacccgagctggagtgcagtggtacaatcatggctcactgcagccttgacctcccgggttcaagcaattctcctgcctcagcctcctgagtagctgagacaacaggcatcagccatcacacccagctaatttttataaagacatttttataaagacttgctatgttgcccaggctggtcttcaactcctgggctcaagtgatcctcctgactcggcctcagcctcgcaaagttctgggattacaggtgtgagccactgtgcccggcctctgttctgcgtttctttttttttggtggaggtgcacattagattcttatcacttatattgttcaatggttttatcccagtgtttgcctctttattttatatttagtttttatttaccatagggttttatttattttattttttatttttttttgagacggagtcttgctctattgcccaggctggagtgcagtggcaccatctcggctcactgcaagctccgcctcccaggttcacaccattctcctacctcagcctcccaagtagctgggactacaggtgcccaccaccacgcccggctaattttttgtattttcagtagagacagggtctcactgtgttaaccaggatggtctcgatctcctgacctcgtgatccacccgcctcggcctcccaaagtgctgggattacaggtgtgagccaccgcgcctggcctattttatttttttttttgagacagggtctcattttgtcacccaggctggagtgcagtggtgtaatcatagttcactgcagcctcaaactcctaggctgaagcaattctcctatctcagcctcctgagttaactggaaccacaggcatgagccaccacgtccagctaattttttttttttttttttttaatgtttttgtagagacaaggtctcgccatgttgcccaggctggtcttgaactcctgggctcgagcgatcctcccatctcagtctcctgagttagctggaaccacaggcatgagccattacacctggctaatttttttttatgtttttgtagagacagggtcttgccatgttgggtctcgaactcctgggcttaagtggtcctcttgctgcagcctcccaaagttctgggttacaggcatgagccactgcgtccagccggccatagagtggaacttttacgatgttaaatatccccttgtgtggtttctgtgtttcacatccttcctagaaaggcttccttctggtgggtgccttgccttcttctgagacatctctgtgggtctcagagccatcgttgctgtgttccctttaccctggcccagcacccttatcctctcaggcagtgtgcctgtgtttgtcaggctggcttatggggtggggacagaaacccactgatgcaccctcatccagactttattatttatgtatttttgagacagagtctcgctttgttgcccaggctggagcgcagtgacacgatctcggctcactgcaccctctgccccctgggttcaggtgattctcctacctcagcctcccgagtagctgggattataggtgtgtgccaccatgcctggctaatttttgtaattttagtagagatggggtttcatcatgttgcccaggccagtctcaaactcctgacctcaagtcatctgcctgcctcagcctcctgaagtgctgggattacaggcatgagccatcgtgcccggccacatccagacttcaggtgtggaaaggaatcatggttctcacaggtggctgctttcagcagctgagggggtttctctttctggccttcatctcttcctctctttttgcctgctcgctcttctttctctctctctctctctctgcagatttctgctttctgggctcttgcctgccccacacctaagccctgtgctaagccctttacctcctgagcttatgtaggcctcaccaccatcctaggaggtaggtattgttataaaccccattttatagatgaggaaactgaggctcagggagatagcagtctccctcgaggtcacagccaagtagctttccagccaagatttgagtctggatctatctagcttccaacctgccctctttcttttctttttttttttttttttttgagacgaagtctcactctgtcacccaggctggagtgcaatagtacagtctcagctcactgcaacctctgcctcccaggttcaaacaattgtcccacctcagcctcctgagtagctgggactacaggtgcgtcccagtacaccgggctaatttttgtatttttagtagagacggggtttcactatgttggccaggctagtcttgaacttctgacctcgtgatccacccgcctcagcctcccaaaatgctgggattacaggcgtgagccaccatatccggccaatgttttttttttttgagatggagtctcgctctgttgcccaggctggagtgcagtggcgctatctcagctcactgcaacctctgcctcccaggttcaaatgattctcctgcctcagcctcctgagtagctgggaacacaggcacacgccaccattcctggctgatttttgtatttttagtagagatggggtttcaccatgtcgatcaggctggtcttgaacttttgatctcgtgatctgcccgcctcagcctcccaaagtgctgggattacaggcgtaagccaccgtgcccggcctaacctgccctctttgttcacatgaactgggagaaaatcaactgacaaaatctggaaatgggcggggcgaggtggctcacgcctgtcatcctagaactttgggaggccaaggcagatggatcacctgaggtcaggagttttgagaccagcctggccaacatggtgaaatcccatctttactaataatacaaaaattagccaggtgtggtggcattcacctgtaatcccagctactggggaggctgaggcacaagaattgcttgaacctgggaggtggaatttgtggtgagtcgaggtcatgccgttgcactccagcgtgggcaacagagtgagactccatctcaaaaaaacaatctggagatgacatatacaacacatgcatctttccagcttggtctcccagtctgtagaatgaggaggttggtcaggcatggtgggtcgtgcctattatctcaaggtttgggtagctgaggtgggaagatcatttgaggccaggagttttagaccagcctgggcaacatagcgagatgccatctctacaaaaagatttttttaaaaaagaaaacaatcagaataaacacaagtatttaaactctgagacagatacacaagtatttaaactccgagacagataataattgcagttgtacaacactctatgcttctggtgtacttggcattttgagttacagagaatcaagaaatatgattctcacagatgaatggttacaaatggtaattttttttttaatcagctcaccttatcataggaacagatacagcaggagaagctttatttaagagacacaaacaaatatatttaccaacaagccatcacaaaaataataactaataacaacaacagtaacagctaacatacagtggttagctatcctaagcgttttacatgcatctttagatatgctttaaaccttatagcaacctgtaaggttggtactctttttttttctgagatggcatctcactctgtcgcccaggctggagtgcaatggcgcgatgtcgactcactgcaacctccacctctccagttcaagcgattttcctgcctcagcctcccgagtagctgggactacaggcgcccaccaccacgcctaatttttgtatttttaatagaggcagggttttgctatgttggccaggatggtgtctaactcctgacctcaggtgatccacctgcctcagccttccaaagtgctgagattacaggcatgagtcaccatgcccagccaaagttttttgtaaggatgaaaaatattttttttaaaaatggaatcaggctgggcacagtggctcacgcctataatcccagcactttgggaggccaaggttggtggatcacgaggtcaggagttcaagaccagcctgaccaacatgatgaaaccccgtctctactaaaaatacaaaaattagccgggcatggtggtgtgtgcctgtaatcccagctgctcaggaggctgaggcaggagaatcaggaggccttctcaaaaaaaaaaaaaaaaaggaatcaaagcccgacatggtggtggtggcacatgcctgtagtcctagctatttgggagactgaggctggaggatcacttaaccccaggagtttgaggctgtagaatgatactgcacttcagcctgggtgacagagggagactccatctcttcaaaaaaaaaatgggtgaggtggggtggctcacgcctgttatccaagcactttgggaggctgaggtgggtggatcacttgagtgcaggagtttgagaccagcctgggcaacatggtgagacactgtctctacaaatacaaaaattagtcaggtgtgatggtgtgtgcctataatcccagttactagggaggttgaggtgggaggatggatttagcctgggaggtcgaggtgcagtgagctgtgatcccgcctctgtgctctggcctgagtgacagagcaagactctgtctcaaaaaaaaaaaaaaaaaaaatagaatcacatagttggatcttggaaatgcctgctctgtgagtagcattcaggagtttaccacatgctagaagatcttgggatcttcacagccccactcatctagcccagactttctagtttacatttaactcttatctctcagatgtaaatggttctatgattctgagattctttggtgctccagtgcctcctgtttccctggctggggtgtctgcaggggtgtgtaggaaggcatggatggggccaggcgcagtggctcactcacgcctgtaatcccagcattttgggaggccaaggtgggtggatcacttgagtccaggagtttgagaccagcctggtcaacatggtgaaaccctgtctctactaaaaataaaagaaaaaattatcagagcaagtctgggcccggtggctcacgcctgtaatcccagcactttgggaggccgaggtgggggaatcacgaggtcaggagtttgagaccagcctggccaacatggtgaaaccccatctctactaaaaatagaaaaaattagctgggcatagtggccagcgcctgtaatcccagctactcgggaggctgaggcaggagactcacttgagccctggaggtagaggttgcagtgagccgagatcgtgccactgcactccagcccaggcgacagagtgagactccgcctcaaaaagaaaaaaaaaaattagctgggcatggtggtgcacgcctgtagtcccagctacttgggaggctgaggcaggagaatcacttgaacccaggaggtaggggttgcagtgagctgagatcatgccactgcacttccagcctgggctacagagcgagactctgtctcaaaaaaaaaaaaaaaaaagtatggatgggtttggagggctggctgctgaggttgggatttggctgagtacctatctacctttcttactgggcccatctgctcccctcagatcctggtggctttgagacaccttcacttcaagaacattgtccactgtgacttgaaaccagaaaacgtgttgctggcatcagcagacccatttcctcaggtcagttatgtcccctcctgatttggggaaatccaggcaacactgatggccggggtgggggtggggaaggggattatactaatcaagatgtgggggcgaggcacagtggctcttgcctgtaatcagcattttgagaggctgaggcaggaggatcatttgagcccaagagtttgagaccagcctgggcaacatagcgagacctcatctatacaaaaaatgaaaaaaaaaatagccgggaatggtggcgtgcgcctatagtcctagctgcttaggaggctgagatgggaggattgcttgagcccaggagttggtggctgcagtgagctatgattgtgccactgcactccagcctgaataacagagtgagagctgtctcttaaaaaaaaaaaaaaaagactgggtgcggtggctcacgcctgtaatcccagcactttgggaggccgaggcgggcagttcacgaggtcaggagatcgagaccatcctggctaacacggtgaaaccccttctctactaaaaatacaaaaaaaaattagcggggcgtggtggtgtgcgcctgtagtcccagctacttgggaggctgagttaggagaatggcatgaacccgggaggcggagcttgcagttagccgagatcacgccactgcactccagcctgggtgacagagcgagagagcgagactctgtctcaaaaaaaaaaaaaaaaatatatatatatatatatatatagtttatcccaacatatagcactttattcaacatgtagtcaacataaaaattattaaggccaggggaggtggctcatgcctataatccccgcactttgggaggccaagatgggaagacggcttgagaccaggagttcaagtctgaagtgagctatgattgtgccactgcactccagctggggtgacagagcaagaccctgtctcttaaaaaagaaacaaaactcaatgaaacattctgcttgtttttcatactatgtcttcaaaatctggtgtgtataacagttggggaaatagattgacatgcccaagttgttccaaacatatttaaaagttttctggttgagcgcagcggctcatgcctataatcccagcactttgggaggctgaggcgggcagatcacttgaggtctggagttggataccagtctggctaacatggcgaaaccccgtctctactaaaaatacaaaaattagctgggcatggtggcgggaacctgtaatcccaggttctcaggaggctgaagcaggagaattgcttgaacccaggagggtggaggttgcggtgagccgagatcacaccactgcactccagcctggacgacagaccaagactcgtctcaaaaaaataataataaaataaaaattttaaaaaagatccataggaaagtatagatcttggaaaagagaaagagctataagatctgtagaaagggcagagtacctcaggaaagggtggctgtcacattgagattcaggtcaggggttgaggcgtggctggtttcaaaggtgacagaggcttcaggcttcaaggatttggggctctatcctgcaagcaacagtgagccaaggaagggttttgaacagggaaaggacagtacatgaacagagctgggaaccaaggctgagaggtaggcagcagagcaagaccttgaacccaggtcttgctggctccaaagcctgtccatgaccttagactgcagccattaacaatgagggtatggggccaggtgtggtgtctcatgcctgtaatcccagcactttgggaggctgaggcaggaggaacacctgaggtcaggagtttgggaccagcctggctgatgtggtgaaatgtcgtctctactaaaaatacaaaaattagccaggcatggtggcgggtccctgtgatcccagctattcgggaggctgaggcaggagaattgcttgaacctgggaggcagaggttgcagtgagccaagatcacgctactgcactccagcctgggcgacagagcgagactccgtctcaaaaaaaataaaacaatgaaggaaaggtaggcatacaccatactgtctgccagctaccgcagtcagcacccactcctacctaatccccaggaaagcctgagaggaggctgctatcaacaaccccccaatacagatgacaaaatcaaggcctggagaaattaggtccttgacctgagatcatcgagggtcattctgtgctagacactgctcctaacacgttgcatacatttctctttcagtctaaacaagcaccctttaaggtagggactgttaagatctccattatgtttcatgttttttttgtttgttttttgagacggagtctcgctgtgtcacccaggctggaatgcagtggtgcgatctcggctcactgcaacctctgcctcccaggttcaggcgattctcctgcctcagcctcctgagtagctgggaccgcaggcgtgtgctaatttttgtatttttagtagagatggggtttcatcgtgttggccaggctggtctcgaactcctgacctcaaatgatccatcttccttggcctcccaaagtgctgagattgcaggcatgagccaccacgccccaatcatgtatattttgaggctattaaaaaaaatctgcattattcaaaagaggaaacagcgacccattggaggtggcagaggtatagcagcagctagcatttattgtgcaccaactgaatgccaaatattgtcctgtgggctttggatggtttaattcactaaccatcatggcagtcctctgagataggtgctcttctgctcttcttcctatagatggggaaactgaggcacagaggggggaagtcacctgcccagggttgctcagctagtgagccaaggagcctggattcaaaccagcatccagctttctctggaataccatggagggtggtgtggtggggatgctggggtgggtgcggctccatcacctggtggagcctccatcccttgccctctgcaggtgaagctgtgtgactttggctttgctcgcatcatcggcgagaagtcgttccgccgctcagtggtgggcacgccggcctacctggcacccgaggtgctgctcaaccagggctacaaccgctcgctggacatgtggtcagtgggcgtgatcatgtacgtcagcctcagcggcaccttccctttcaacgaggatgaggacatcaatgaccagatccagaacgccgccttcatgtacccggccagcccctggagccacatctcagctggaggtgcctggggcccgcctaccccatgggcgggtgggttgtggggtggggctggagaagtgggcggagccatgagaggggggtggacccggaaacagcctggcaccttgggggtggagcccagtgctggggcgggcctactggagggatgtggctacaggaggagccgtcctgtaaaagatgggctgggactcaggcctagactaggttacttgggctggaaaccaagtgccccagaagcgctgaggacacttggaaccttaggggggctgagtgagacttggcttgtctagggtgggaccaggaaagggactggacttgagggtaccaaagggctgcggtgaccaggagaaggggctgagcctcccaaggcattggctgggacctggagcctttgggtttacgaccccaaaagggtcagccttgcaaaaaggaggcaccggtgggtagggttgagaaacaagggcatggctactttgctgtgtactggggccgtgacttgggtgaagatgggcctgaagcctggggtcggttcagtgaccaagggagccagtctagggacgtggccgtggagggtttccgaagaggtccaggaacagggctgaccctgagtcctggaagctgggagtggatgggagtggggaggagaagggagccaggactgaggcagacattgcactctgcattctggggctttggtgttgtggctgggcctgatgaagtggcaccgggcctggtgacttgaacctacttgggaatgggtctgtaactttccctgcttggaaaagttaagtcctaaggcctggagctttgaggctgggtgtgggatggcatgtttagagggccagaggcagggctaagatactggggtgtgtcagaagccaggagaacaagggacctgtgttggagccagggagctcaggaagacagatggagtatgggaaggggggggatcattcattcatttatttataaccatttattcaacaagtacattcatgtatttgtaaccattgattcaacatgttgagtgcccacgatgtgccaggcattgactgttccagctctgggaatactgtgatgacttggacagaaggggtcaggtgcagggtagctcattgagtggtccgcgaagggtggaaaggggaagggtcctctctggagggtgcggcttcatggagcaggtggagcagggtgacacggaggttgctcggtgcaggacaagacaaggtcttggtggtggtctaagagcatgggccctaagcagtgagaatgtggattgacttgagtcctggagtaatattgggggtgctcaacactggcttttttttttttttttgaggtggggtctcgctctttcacccacgctggagtgcagtggcgtgatctcggctcactgcaacctccacctcttgggttcaagggattctcctgcctcagcctcccgagtaactgggattacaggcacacagcaccatgcctggctcatgttttatatttttagtagagacagggtttcgccatgttagccaggctggtcttgaactcctgacctcaagttatttgcccgcttcagcctcccaaagtgctgggattgcaggcataagccatcacaccccgccagcattgtcttttgagacccactcagaagtccctcagtaaaagtgcatcgagtgtgcacaagtgaatttaagtgtggttgcacctgtgtgaggatcacagaatcctgtgggtgttgacgggagcagggtgcctgtgtgcaccaggcctctcctcggatgggttcatacagtgaagccttgtccttcatggcttcccatcaaggagagagcctcggatgagtgctggcttgtcttgaagcttgacattcgctagtcctctttttcacaatgaacaggcctatctctgagccttctgcaggcaatggtgactaactaccatctgatgacattttgttttgttttgttttgttttgagacggagtttcgcttttgtcacccgggctggagtgcagtggcacgatcttggctcactgcaacctctgcctcctgagttcaagcgattctgcctcagcctcctgagtagctgggactacaggcatgcgctaccatgcccagctaattttttgtatttttagtagagacggggtttccgtgttggccaggcttgtctcgaactcctgacctcgggtgatccacccgcctcggcctcccaaagtgttgggattacaggcatgagccaccgcgcccagcctgatgacatagatgctccctgatttgcactggggttagataaacctgataaacccattgcccattgtaaattgaaaatatcataagttggtcaggcgcagtggctgaagcccataatcccagcaccttgggaggccaaggtaggcagattgcttgagcccaggagttcaagaccagcctgggcaatgtatctctacaaaaaatacaaaaattagccggccatagtgacaggtgcttgtagtcccagctggctgctcaggaggctaaggcaggagaatcaattaagctggggaggtggaggcttcagtgagcattgatcacgccactgcacttcagcttgggtaacaatgagaccctgtctcaaaaaaaaaaaaggaagtattgtaggttgaaaatccatttaggccgggcgcagtggctcatgcctgtaatcccaacaatttgggaggccaaggcaggcggattgcttgaggtcaggagttagagaccagcctggccaatatggtgaaaccccatctctactaaaaatacaaaaagttagcaggacatggtgacacacacctgtattcctagctacttgggaggctgaggcaggagaatcacatgaacccgggaggcggaggttgcagtgagccaagatcgtgccattgcactccagcctgggcgacagagcgagactctgtctcaataaataaataagtaaaaataaaaagaatagtacaggtgtaattgtatgtacctgtatatgacaaaaagaaaaaaaaaggtgacataggggaatggggaaattgaagtagagaacaggtgaagagagggagctggtgtgaacatgcatgggcaggaggagacaaatttgtaatgtaatgaggaaatgggtgggtgagtgattggcacaggtgaggcttctgagccacctgagctggtgcagaaggaaggtgttgatggcaggcaggtaggctagggggtgcctattggaggaggagtgacccttgacctgtagggcttgacctgtttctctttcctgtgcagccattgacctcatcaacaacctgctgcaggtgaagatgcgcaaacgctacagcgtggacaaatctctcagccacccctggttacaggtgatgcagggggcagggctggcccattggctggattggaggaaggggtgggagtagatcgcttattggctaggcaggttgtgaaggatgtaggtttccttgggtctggaatgtggctaggcctcccattggctgggtgcaggaagagggggtggagctaaatgtctactggctgggtgggttgcagagggtatggcttcaccttcattggtacccagctctcagtggcaaaccagaggatatccaggcactgctccaatgcagaccccaagctaaccccagttctctcgggcccaggagtaccagacgtggctggacctccgagagctggaggggaagatgggagagcgatacatcacgcatgagagtgacgacgcgcgctgggagcagtttgcagcagagcatccgctgcctgggtctgggctgcccacggacagggatctcggtggggcctgtccaccacaggaccacgacatgcaggggctggcggagcgcatcagtgttctctgaggtcctgtgccctcgtccagctgctgccctccacagcggttcttcacaggatcccagcaatgaactgttctagggaaagtggcttcctgcccaaactggatgggacacgtggggagtggggtggggggagctatttccaaggcccctccctgtttccccagcaattaaaacggactcatctctggccccatggccttgatctcagcacacggcactctcgaatcattactctgttgtaccaacatggagttcatctggaaggaggactgcctgaaaagaggaaggatggaaggggtggggagagaggactgatgggagaggagtcttggaaggaggacgagctggggtagaaaatatacaggaagagtgccaggagagaagatgagaagggagagggaggagtaatggaggaggagttggaaactggggagagatggaaggaatgtgactggagggtagagaacttggagaaaaagtaatctcatggtttgtgatgactgattttttatttggtggtggtgttactactaatcacaactattaattcaggctgggtgtggtggctcatgcctataatcccagcaatttgggaggccgaggcaggcagatcccttagatctcaggagtttgagagcagcctggccaacgtggtgaaactccctttctacaaaaagttcaaaaattagccaagtgtggtggcttgcacctgtggtcccagctacttggaggttgaggctagaggatcgcttgagcccaggaagcagagattgcagtgagccaagatcacacaccactgcactctagcctgggcaagagagtgagaccctgtctcaaaagtcaaataataaaatgcagttagcccaagtctgatccatactagaaaactgatacgtaacattcagtattttattttatgttgatgtgatgacttctctatctatgaaatagagaagtatatattcactcattcctttgtgtcactgagctgggtgatgctggggacacagtggtgactgagacagccaaggactgccctgccagtagagagacatacctgcccctggacagtgatgacccagaacgggaagggctggactgggggagtttgggaggcttgggcagcctagaatgagctcaggggtcagagagagtggggaatcagaggtgacctcttaggcttcatcttggccttgaaagactgaaggcagagggaatgaactggagggaacacgtatccacctctctctacctttgactccagccctccacctccccagttctccagtaacaccctaacacatggtcctccaccttccacagctgaaggtgaacgatccgagcatggacctgaacaagttttcttcagactttcagaacgctctgacttacgtgctgcaaagacctatctgaaagctgggcatggtggcgggtgactgtattcccagctacttaagcggctgaggtgggaggatcgctggagtccaggagttcgagtccagtttgggcaacacagccttaaaaaacccaggaaaacaggaaagaatttagtagccaatttaggctaatactgggagcttactctgggattttccaatttgatttgtatcaccttgtccatctgatggttccagagctgcagcttttttttttttcctgaggcagggtctctgtttcccaggctggagtgcagtggcatgaacacagctcactgcagccttgaccttctgggctcaagtgatcctcccacctcagcctcctgagtagctagaactacaggcacatgccaccatgcccagctaattttttggattttttgcagaggttttaccatgttgcccaggctggtctcaaactcctgggctcaagcgatctgcctgcctaggcctcccaaagtgctgggattacatgcatgagccactgcgcctggccaaaatgcagctctttgatttgaaaatgctaaacgagcctcagtaaatgaaggtatccaaaggagcagtatacctctgaggcatagttgctaagactattggggaaaggctcttagactccatccccagtgcctatccctctgtttagtctaaggtccagaagtgtaggcaacatagagatgaatccatctcccgtgacagacccaggctagaaaatgtatggaaaagactatcagccctgatctgcttctgtcttggccactagttaatatccagagaccagaaatgagagacgtgattcaaaaacattcctcaattatagaattccaggagatagtgtatatcatgaggatgccatgaaagataaaatcaaggccgggcgcagtggctcacgcctgtaatctcagcactttgagtgctgaggtgggtggatcatctgaggtcaggagtttgagaccagcctgatcaacatggagaaaccccgtctctactaaaaatacaaaattagccgggcatggtggcacatgcctgtaatcccagctactcgggaggttgaggcaggagaatcgcttgaatctgggaggcggaggttgcggtgagctgagatcgtgccactgcactccagcctgggcaacaagagcgaaactctgtctcaaaaaaaaaaaaaaaaatcaaatccatacaatgaaaacttagggccctataacttaaatcattagagacaaaaagtttatcctatcaggaccactggaatcacaaaacctaattttgtttgttagagacagggtcttgctctatcacccaggcttctgtgcagtggtatgatcgtagctcactgcagcctcaaactacagggttcaagccatcctccccctcagcctcttgagtagctgggactacaggcatgagccaccacacctcgctaattttttgttttttatgtagtttttaatttttttattattttattattttttgagatggaatcttgctctgttgcccaggccaaagtgcagtggcatgatcacagctcactgcagcctcaacctcctgggctcaagtgatcttcccacctcagcctcccaagtagctaagactacaggcacatgccaccacgcccagctaatttttgtatttttagtagagaaggggttttgccatgttggccaggctggtctcgaactcctgacctcaagtgatctgcccacctcggcctcccaaagtgctgggattacaggcatgaaccaccgtgcccgggcatgttttttatttgttatagagatggggtctcactatgttgccgaggctggtcttgaactcctggggttgaacgatcctccacctctcaaaagtgctgggattacaggtgtgggccactgcactcaacctcaaaacctaatgttgatagagacacttgtatatactgtaaagaaaagggacattggacttgacactatttagctttgaaatgcaaaaggaatttgagtctaagattcagtctcccagtgactcacttccagccaactttctcctctgtgtctataaggattccttaaccttcagggggaaatgaccatcaatccccttaatgagcatcctgccagggtttttgtagacacaggggccacatgctttgccataaatatctcagtcccccctccctacctcagtacacagcaataatggtgatgagaccacaattagccacatggtttatgcctgtctaagccactcttgggctcattgggctctctactacccagcacagtttcttattcaaattactccaataatccctttagaaagggatgttctatcaacgtagaacaataatatttcttttttgtttgtttgtttgtttttgagatggagtctcgctctgtcacccaggctggagtgcagtgatgcgatctcacctcactgcaacttctacctcccaggttcaagcgattctcctgcttcatcctcccaagcaactgggatcacaggtgcacaccatcacaaccggctaatttttgtatttttagtagaggcagggtttcaccatgttggacaggctggtctcaaactcctgacctcaagtgatccacctgccttggcctcccaaagtgttgggattacaggtgtgagccaccgtgcccagccaaagccataatatttcatattcacaagagggcttatgtctcccagtccctaattctgcccttgttcatctcagtccactaaccttcccaccactccaaccacccccttcccaaaacatccacctctccctcagacctacatatccaagatctgtgacttgcattcctgattctctttgagcccccaactcaacaaatgtagggtgcctctgggaggctgaacctcttaaggtagaagtagatcctttctttttagaattaaaaaaaattttgtttaaatagagacaaggtcttgctatgtcgcccaggctggtctcaaagtcctggcctcaagcagtcctcccacctcggtctcccaaagtgttgagattacaggtgtgagccactgcacctggctccctttttttttttttaaccaattaccccaagttgtggaatagaattagatcttttcatgcccttcttgaagctgccttaatgtgctctgacaccagaggcacactagggcccccaacccattattcagagcctcctactatccacttccatcccctacaacactcctgtctgccaagaatcctaatgataacacctgtaatttgggaggccgaggcgggtagatcacctgagatcaggagttgtagaccggcctggccaacatggtgaaaccccgtctctactaaaaacaaattaaaaaattagccgggcatggcggcaggtacctgtaatcccagctactcaggaggctaaggtagaagaattgcttgaacccgagaggcagaagttgcagtgagccgagatcgcgccattgcactccagcctgggtgacagagtgagactctgtctcaaaaaaaaaaaaaacaaaatcccaataacagtctcgataaaggataccagcaagtccaagacctcaaggctgtaaacaaaatagtcacactgtggttcctgctatttccaatccaaacattatactggcctctattctagaccggccaacaccacccactcgactgtactcacatgccctctgccttctttcacacacctgatgatccacagccccatttccctttccccttgaaagtcaacagtaaacatacatacactgctatgcctcagtggttcgttgaaacccctacttacttttttttccgatcctgaatgctaatttgagggatttggttttctcctgtaattccattctaatcccatacatagatgatgtcctgtctggtcagttcattccagcagctcactcactcacactccacacgtgccccaagtttctgcaattatacaggaagtaggaaaaacaaataaaaatcggccccaagcccttgctcataaaggacaggctcatgtctgtaatcccagcactttgggaggccaaggtgggaggatcacttgagcccaggagttcgagattagcctgggtaacatagggagacccccatctctacaaaaataaaaaataaaaaaattagctgagtgtggtgatgcatgcttctagtcccagctactcaggaggctgaggtgggaggattgcttgagcctgacaggttgaggccgcagtgagccgagattgcatcacagcactccacctgggcaaaagagcaagaccctgtctcagaaaaaaaaaagggtgtctaggataaattataactatgtaattcataagtacaagatttagggcatgaccttgcccttgaaggcaaaaccttatccacacagcatgcatttataccattattatttttgttttatccaagactaaaaggcaactccagtggtttctgggctggtcattggttgaattttgtctccctagtacctcaggatatgaccctacttggaaataagttcattgcagatgtaatcagttaaaaggaggtcatactggagtagggtgggcccctaatgcaacatgactggtgtctttttttgttgttttttgagatggagtttcgctcttgttgcccaggctggagcgcaatggcgcgatcttggctcaccgcaaaccctgcctcccgggttcaagcgattctcctgcctcagcctcccgagtggctgggttacaggcatgcaccaccatgcccggctaattttgtatttttagtagagacggggttttctccatgttggtcaggctggtctcaaactcccgacctcaggtgatccgctcgcctcggcctcctaaagtgctgggattacaggtgtgagccaccgcgcctggccgagtggtgtctttatgagaaggtggccgcgtaagacacagggagaagcatgtgaggatgaaggcagagcttggaatgatgcagccacaagccaaataatgttagagattgccaagagccaccagaagctgggaagaggcaaggaaggattgcctggggaattggagctccctaacatgctttttttttttttttttttttttttgagacaggatcttgctctctcactcaggctggagtgtagtagcacgatcatagctcactgcagcctcaaactcccaggctcaaacaatcctctcgcttcagcctccctactagctggaactacaggcatgcaccactatacctggctaagtttttaaattttttggagatagggtctcactatgtggcccaggctggttcccaactcctggcctcaagcgatccttgcgccttggcctcccaaagtgctgggatttacaggcatgagccaccaggcccggacccagattcttttttttttttttttgagatggagtcttgctctgttgcctaggctggagtgcagtggtgtgatctcagctcactgcaacctctgcctcctaggttcatgctattctcctgcctcagcatcctgagtagctgggactacaggcacccaccaccatgcctggctaattttttgtatttttagtagaggcagggtttcaccgtgttagccaggatggtctcgatctcctgaccttgtgatccacccacctgggtctcccaaagtgctgggattacaggcgtgagccactgcgtcaggcccccgggccccagattcttattctttcttgtcctgaccttgcagagcctccatgtgacaatctcgtgtcaccctctttgtggatggcccttcaccttaaacacccggcaggaaatttctaagcagtaggctctcttctgactttcaacaagctcatagtgtttccatgcctccctgaacccaagtcagcccaaacagcacactcagcgccagaggggggatgaggaaaaggaagattttaatttttttttgtagagacaaggtttcactgtgttgcctaggctggtcttgaactctcgggctcaaacgatcctcccacctcggcttcccaaagtgctgggattacaggcatgagccactgtgcctgacccaggaaagatgttgatcaaaggtacaaagtttcagctagactggaggaatacattttagcggcccattgcactgcacagtgaccacagttaataattgagacagggtctttttctctcacccaggctggagtgcagtggtgcaatctcagttcactgcaacctccgcctcctggattcaagcgattctcctgcttcagcctcctgagtagctgggattacaggtgcgtgccaccatgcccggctgattttttggattttagtagagatggggtttcaccatgttggccaggctggtcttgaactcctgacctcaagtaatctgcccaccttggcctcccaaagtgctgggattacaggtttgagccaccgcgcctggccgagactgggtaatttataaaggaaagaggtttaattgactgacagttccacatggctggggaggcctaaggaaacttacagtcatggcggaaggtgaagaggcccatctcgcatggcagtaggcaagacagtgcgtgtgtgtaaatgcaggaaaaactaccatttataaaaccatcagatctcgtgagaactccctcactgtcacaagaacagcccccatgagccaatcatttcccaccaggtctttccttaaacacctgaggactgcagttcaaaatgagatttgggtgggtcacaaagcctacccataccatatcaagcaggctaatccagagaaccagtgggtactcccatttcacagaaatcctttagccctattgcctatgatcatcaggacaaattgaacatgccgattcagtctcgtcaaacttaaacttgccaaactaactgaagaattgaacttacccttgcccactgttgtcccttgacttccccataaccacaagcattagcttattttcctttttcttttctttttctttccttttttttttttttttttttttttttgagacagagtcttgctctgtcgcccaggctggagcacagtggtgcaatcatggctcactgcagcctcaacctcctgggctcaagtgattcttcctccccagcctccccagtagccaggacttcaggcatgcaccaccacgcccagctaattaaaaagttttttgggccgggtgcggtggctcacacctataattccagcactttgggaggccaaggcaggcagatcacttgaggtcagaagtttgagaccagcgtgaccaacatggtgagatcccgtctctactaaaaatacaaaaattagctgggtgagttggctcatgcctgtaatcccagctactcgggaggctgaggcaggagaatcactgtaacctgagaggcggaggttgcagtgagccgagatcgtgccactgcactccaatctgggtgacagagcaagattctgtcttgaaaaaaaaaaaaaaaaaagacaaggagagaggcacagggatgtgtgcacacatactggaaaccatgtgtggacacagtgagaaggtgaccatctgcaagccaaggagagaggcctcggaggaaaccagccctgccgacgccttgatcttggacttcttggcctctagaatggtgagaaaataaatttctgtcgtttaaactatgtctgtagtgtttcgttatggccaccttagcaaatgaatacactgctagaataaatcaccatgaatgtggtggcttaaaacaacacagatttattttattttattttttgagacagggtctttccctgtcgccccaggctggaatgcactggcacaatcacagctcactgcagcatcagactggtggcctcaagcgatcctcctcctagataactgggaccacagatgtgcgccatcatgcctggctaattttttgatttttttttttttttttgtagaaacgtgttgcccaggctggtctcaaagtcctggcctcaagcgatcctcccccactcggcctcccaaagctttgggattacaggtgtgagccactgtgcctggcccggcctctgcttctatatttacatatttctctgactctaacgttcttgcctccatcttataaggaaacttgtgatgatactgggtccaccaggataatccaagataaatctccctatctcaagattcttaatcacaaaaagttcctttttccataaaaggtgctatattcacaggttccagggataaagatgtagacatcttaggggggggccattactcttcctaccagagcacatatcaataatcttcttatgaaataatcactcaaagactcacaaggattctactcctattgggcccttgaggactctaatctattacaatcgacattctcagatattatcaaggactaagtacacttatgcttgtcactaacaagtgtgagctgccttccctccaaatactccatcacggcctcttcataatttccaaacagggaatttagtcctccggaaaagacatcgcaggaagactaaccttgaactcagatgggatggaccctacactattgcaaacaccagactgtcctgccttgggttcatatctcagagatgaagagatataagacctgtgctgaatgggaatccactcccgttggagacctcagagggaggctctttcaag

SEQ ID NO: 421 - DNA, 3156 bp, Homo sapiens
cgccgccgccgccgacttaaactttggagggggaaaaagagctactggcgcctggcgaccctccctgccccccacccaaccccgctccggcaacgcccccttcctcacggctcccgaccgaacttttctccaacttctgcgactcgtgagattcccttctacccactccggccctcgggacccctctgcccatcccctggccggtcgggtccctgcgaacccctttatctctggaatccactcggtccccgactcagagactcctgccctccacccccaaggaccccgccatcctcaggtcccctccgcctgccagatcttttctcggatccccgctctcccaccacctgctcacgagatcccgcggatctagaacccagggtcccccggggccccccggccgggtcccgggtgggctccaggcggccggtccccggcctccccccatggccaccgccccctcttatcccgccgggctccctggctctcccgggccggggtctcctccgccccccggcggcctagagctgcagtcgccgccaccgctactgccccagatcccggccccgggttccggggtctcctttcacatccagatcgggctgacccgcgagttcgtgctgttgcccgccgcctccgagctggctcatgtgaagcagctggcctgttccatcgtggaccagaagttccctgagtgtggcttctacggcctttacgacaagatcctgcttttcaaacatgaccccacgtcggccaacctcctgcagctggtgcgctcgtccggagacatccaggagggcgacctggtggaggtggtgctgtcggcctcggccaccttcgaggacttccagatccgcccgcacgccctcacggtgcactcctatcgggcgcctgccttctgtgatcactgcggggagatgctcttcggcctagtgcgccagggcctcaagtgcgatggctgcgggctgaactaccacaagcgctgtgccttcagcatccccaacaactgtagtggggcccgcaaacggcgcctgtcatccacgtctctggccagtggccactcggtgcgcctcggcacctccgagtccctgccctgcacggctgaagagctgagccgtagcaccaccgaactcctgcctcgccgtcccccgtcatcctcttcctcctcttctgcctcatcgtatacgggccgccccattgagctggacaagatgctgctctccaaggtcaaggtgccgcacaccttcctcatccacagctatacacggcccaccgtttgccaggcttgcaagaaactcctcaagggcctcttccggcagggcctgcaatgcaaagactgcaagtttaactgtcacaaacgctgcgccacccgcgtccctaatgactgcctgggggaggcccttatcaatggagatgtgccgatggaggaggccaccgatttcagcgaggctgacaagagcgccctcatggatgagtcagaggactccggtgtcatccctggctcccactcagagaatgcgctccacgccagtgaggaggaggaaggcgagggaggcaaggcccagagctccctggggtacatccccctaatgagggtggtgcaatcggtgcgacacacgacgcggaaatccagcaccacgctgcgggagggttgggtggttcattacagcaacaaggacacgctgagaaagcggcactattggcgcctggactgcaagtgtatcacgctcttccagaacaacacgaccaacagatactataaggaaattccgctgtcagaaatcctcacggtggagtccgcccagaacttcagccttgtgccgccgggcaccaacccacactgctttgagatcgtcactgccaatgccacctacttcgtgggcgagatgcctggcgggactccgggtgggccaagtgggcagggggctgaggccgcccggggctgggagacagccatccgccaggccctgatgcccgtcatccttcaggacgcacccagcgccccaggccacgcgccccacagacaagcttctctgagcatctctgtgtccaacagtcagatccaagagaatgtggacattgccactgtctaccagatcttccctgacgaagtgctgggctcagggcagtttggagtggtctatggaggaaaacaccggaagacaggccgggacgtggcagttaaggtcattgacaaactgcgcttccctaccaagcaggagagccagctccggaatgaagtggccattctgcagagcctgcggcatcccgggatcgtgaacctggagtgcatgttcgagacgcctgagaaagtgtttgtggtgatggagaagctgcatggggacatgttggagatgatcctgtccagtgagaagggccggctgcctgagcgcctcaccaagttcctcatcacccagatcctggtggctttgagacaccttcacttcaagaacattgtccactgtgacttgaaaccagaaaacgtgttgctggcatcagcagacccatttcctcaggtgaagctgtgtgactttggctttgctcgcatcatcggcgagaagtcgttccgccgctcagtggtgggcacgccggcctacctggcacccgaggtgctgctcaaccagggctacaaccgctcgctggacatgtggtcagtgggcgtgatcatgtacgtcagcctcagcggcaccttccctttcaacgaggatgaggacatcaatgaccagatccagaacgccgccttcatgtacccggccagcccctggagccacatctcagctggagccattgacctcatcaacaacctgctgcaggtgaagatgcgcaaacgctacagcgtggacaaatctctcagccacccctggttacaggagtaccagacgtggctggacctccgagagctggaggggaagatgggagagcgatacatcacgcatgagagtgacgacgcgcgctgggagcagtttgcagcagagcatccgctgcctgggtctgggctgcccacggacagggatctcggtggggcctgtccaccacaggaccacgacatgcaggggctggcggagcgcatcagtgttctctgaggtcctgtgccctcgtccagctgctgccctccacagcggttcttcacaggatcccagcaatgaactgttctag

SEQ ID NO: 422 - protein, 864 aa, Homo sapiens
MATAPSYPAGLPGSPGPGSPPPPGGLELQSPPPLLPQIPAPGSGVSFHIQIGLTREFVLLPAASELAHVKQLACSIVDQKFPECGFYGDKILLFKHDPTSANLLQLVRSSGDIQEGDLVEVVLSASATFEDFQIRPHALTVHSYRAPAFCDHCGEMLFGLVRQGLKCDGCQYHKRCAFSIPNNCSGARKRRLSSTSLASGHSVRLGTSESLPCTAEELSRSTTELLPRRPPSSSSSSSASSYTGRPIELDKMLLSKVKVPHTFLIHSYWTVCQACKKLLKGLFRQGLQCKDCKFNCHKRCATRVPNDCLGEALINGDVPMEEATDFSEADKSALMDESEDSGVIPGSHSENALHASEEEEGEGGKAQSSLGYIPLMRVVQSVRHTTRKSSTTLREGWVVHYSNKDTLRKRHYWRLDCKCITLFQNNTTNRYYKEIPLSEILTVESAQNFSLVPPGTNPHCFEIVTANATYFVGEMPGGTPGGPSGQGAEARWETAIRQALMPVILQDAPSAPGHAPHRQASLSISVSNSQIQENVDIATVYQIFPDEVLGSGQFGVVYGGKHRKTGRDVAVKVIDKLRFPTKQESQLRNEVAILQSLRHPGIVNLECMFETPEKVFVVMEKLHGDMLEMILSSEKGRLPERLTKFLITQILVRHLHFKNIVHCDLKPENVLLASADPFPQVKLCDFGFARIIGEKSFRRSVVGTPAYLAPEVLLNQGYNRSLDMWSVGVIMYVSLSGTFPFNEDEDINDQIQNAAFMYPDWSHAGAIDLINNLLQVKMRKRYSVDKSLSHPWLQEYQTWLDLRELEGKMGERYITHESDDARWEQFAAEHPLPGSGLPTDRDLGGACPPQDHDMQGLAERISVL

SEQ ID NO: 423 - DNA, 66126 bp, Mus musculus
  misc_feature (1)...(66126): n = A,T,C or G
gagccttcacccctactgactagtgttcaaggtactctgctcactaccagaggagaaaggtaaacaccaagctagttacaaaccctaaaatctacaatggtgacctgcctgcaaggtgcacaggtgtgatagtggcataaaagttgtgggagtcgccgggcgtgatggcacacgcctttaattccagcacttgggaggcaaagacaggtggatttctgagttcgaggccagcctggtctacaaagtgagttccaggacagccagggccatacagagaaaccctgtctcaaaaaaacaaaacaaaacaaaacaaaacaaaacaaaacaaaacaaaacagagttgtgggagtcaccaaccactgactgcttggaatcaaggcccagtccataacatggaacccatgccccataaagcccaggtggccaaggacctgagactagataggccatggtcttcagggaaagcaaaatactactggtctgctgaaggattgtagcaacaaaataactgtaatgacattctcctatactcatagatcagtgtcttgctcagccatcatcagaggtctcacatccagatattatgcagagagtgagataccttagaaaacttagtccaaaatgaggcgtccctatcaaattccttccctcagggttcagggaactctgcagaagaggaggcaggaagatttaagagccagaggagatgaaagacacaaggacacaaggccttctagacctaacaggactgaacaactaagaactcacaaagactggtacagcacgcacagagcttacatggggctaagccaaagagggtcccagtgctgagtgcagaagcagacacaaaccctgtctctaaccctgaggttatctccagttgataaccactcaagagaaaaacttcattttctccagtgcggtcttaaaccatacttaagagcaggccccatgcccaacagtagatggccaacacaaaaatgaacaaagtggtatcttggaagttttttgtctcataattttttgtctgggccactgcctcctcctcctctccctcctccttctgccttttccatttatattatcgttcctgattttgtttttataagttttctgtgtatctcaggatttttatgcatgtcttgtgctttttctttggcccttttgttttctgcttctttgacttgtcctactctagtttgtttttattttaacttatttatttatttatttattatttatttgcctgtgttctaatgagagaaagtgtgaatttgagtgggtgaggaagaagaggggatctgggaggaatccggggagagaaaaatcataatcagaatacattgtatgaaaaaaagtctatattcaattaataaaataaaataaatggctatcagggtattttcctgatcaaaattttatctgtgttttctgtaaaatactaatgatgttatattctcagatttcaacagactccaatttgcacgtgtatatttttacaaattttttcaaaagaatgagatgcttcaataaaaagataaagtaacttctcttgtctagtagaaaattggtttatttctttttattttttgggttttttgagacagggtttctctgtgtagtactggctgacctggaactcactctgtagacaaggctggcagaaatccgcctgcctctgcctcccaagtgctgggattacaggtgtgtgccaccactgtccggcggtttatttctttaaaagaaaaaaagttctatctttgcagacatcattctatctttgcagacatcattctatctttgcagacatcattccatctttgcagacatcattccatctttgcagacattccccagcatactgatgttctacgattctgaccaccctgattttctcactctcagaatgttgaatgaaaatattaggctgttataaatggaaggccagtgtattccaaaatacttccatagagtctaatgtgccagtctcaatgatagacactgttgacatacaggataaataagtcaagcgatactcctcgccatcctgagctaatccattttagtgtgttttgtccattttataaagttttgagggggagggggaggttgtttggttgtttgtttttgtttttgttgttgttttaagacagggtttctttgtacatagccctggatgtcctgaaacttcctccatagaccaggctggtcctgaactcagagacctgactgcttgtgcctaattagtgctgggattaaaggtgtggcttacctttttcatttttttaaacctcaatgctttatagtagtatctatgaagcactgaatttatcaaacagttataatttcaaaagtattgaagagatttaataaatttcttatttttgtttggaatttattccaattgttacatttatattgcacaccctaataaaacaaatgtttctcctcttgtatcctacttgaaaaagggatcatctatgtgttccagggaaagtaccacactctgaatcatccctacccaaagatggttcctcttctttgggttttgttctcggtaagaacaaatatgaagagattaaggcacgaatattgcaaggtcagggccagactaaacaacactcagcagtaggggagagaaagagatttaaccttcattcatgtagggctgaaactggaagaagataaacagtgaaggaaatacctaggccagctggctccatcagagcctgaatgtgacattgatatttgaataactacatttctttatatctttggtggcacatgcccttaatcccagcactcaggaagcagaggcaggcagatgtctctgagttcaaggccagcctggtttacatagtgagcccctgtcttgaaaaaaacaaagcgggaagagaaatgttaacagttaagatcattgtaagcataatagttagctaaaattaaaaaaaaaaaaaatcagtggtaaatgctttaataatataaatgattaccacatgatttatctttcttgaaaacacatattttctgggagaggttagtattttttcttacagagggtgtattatttaatttcctttttgctgtgagagacaaagaacaactaaggggggaagagtctgagggcttggcccaccagaggggagagagatgctacctctgcagtcaggaagcagtgggagagagcttgattaagctcagcttcctttctcttctccttcagtcgggagccccatggcccaggtgccgctcccattctgtttgggcttcctgcctcgccaacctactctagaaacttctcagatatgcacagggtttgtctcctaggtgattctggattctgtcaagttgacaacattaacaatcacagaaggtagaaccatcgaattgatgaagttccaataaaaaagaatgtttttaatttaaaaaaatctagagttatgtgagttgttgattaaatatagaagccccaaaagagattactagtgaaatctagagaaaaggtaaaaatttcccatcatttgaagagaatatatttattatttgtatccagggacttaatggcccaaattggactgatgttctagtcagcttcaattttgattttgtatttgcctctaatatcttccattttgtaacttctctgtctcctacagatccaaagttagaggcaggtaagggagcagatgttaatttgccaacaagcagctcattatatggccattttaagtaacactcaagttttatgtgatcatggatcatgaattacactttcaataagtaatattttcaaagtaggattttaagcattataatgttaaatgttaaagatgctttgctgctggtgaccaaagatctaattatttttcattaaatcacaactgggagtacaaggtactcaagacctgcccatgcttctcagcctctggcacctacctactaaaggtggcacaatcaggcaggcgagaatgaaggagaatgttattctcactcaggaataacatctggggctcaaggcttgtctcgggatagagcgcttgcctaccatgtgcaaggcttgagctctgtctcagcaatgtatgaaagcactttaaaaaaaaaaaaggtataagaacaacagctgaaacatcttttatattaaaatccaatttatacaagtttctacactcaaacatatttttaaaaagaaaaaccattgtaagttgacaatagcaattaatgctattaatagtattaatagtaatgctattaattactattaataatagtataatatttatattagtagggagataagctagaagcctatttatgagtgttgaagttacaacttaaaattattattttaagcagcacataattatacttatacatacacctagttcacacacatacacacacacacagaggcacacacatatatgaaagattcaacaaatgtttcaatttattaaaaaatagctattaaatgttaccaaataagctagctcatctatgacagaatgtgactcctttgaaaaatcatgtatatctagtactttctttctctctctcttttttttattggtgtgaatgcacataagtttgggtgccatgtgcatgcagtgcccatggaggccagaagaggggttcagatacactgggacaggagttaggaaaggtggtgagtcaccatgcgggtgctgggaattgaacccgaatcatcttaaccactgagctacctccccagcctcactacttcctttctttttattactttgtaattaacggtattggatctaagaaatactactgccaatcgcagccccctgaggtgctgtcattaccctggtatctaattccacacattctttcatggctttctgtagtgcgactccttgctgctagacatttcttctcagaagagggaaactgagggattaagaggtttatcagcagttataaaacaattttatggcaaaaccgaactcattcttggtctctccaatcagataacatacatgttattcgtgttatttccagtggccacatataacatggaagagtaaagtcatacagtcattaaccgctttctccttgcagtgctatactggagcgtttaaggtagacagtagagccacagggacatcattttagttcaccaagattacactgtaaattcaataatgagataaggcattcgaccactaggataccacattcattatttcaaaatgcaaactgcctacattacaccttaacttcaaagatatttgagactcaaggagattttcaccatgacaaaaagggtctttattgtttcacagtgcatcaaatccttggcatgtctaatagtaactttcttaactgtgaagattttaatcatctattctcaagattggtacactttaagactgagttttctattagtaaactagtcagggacttctgttagcttaatccctctacactgtatttcttttcttcctttttgaataatattatacaatagtgtcacttaatgtgatactgcctcagaaatggagggccaggaaaaccttagtaaaaatccagacagtgcttgcttacttacacgactgtgtttttattgattccttttacaagctgaaaaacactccttcattttgtgtcttttcagataatttggtgattagaaacatagaaaacaagcatgaactctttctaaatcccagaatcaacttggtggctggaatataggctgtccaatggacagcaaataccactgggtttggtatcactacgaaagttattttccttaatgtagatagttgcttgcttaatttctactgaaaacattatatatttcttctgagtctttcacgtgccattattcactgggagatggagatgtcaggcgatgtcaggctttcttgagaacctgtggctcacagtctaccatctgatgactatgaagtgatccaacagtgcactgatctgtaagacaatggcctagcagaagtacactgtttataagtaatgaaaagcttacattctagcagttttttttttcatcagtgaaatggggccttagttcctagggttgtttttttttcccccatcctggttctttctaaatatacttcccatatcctgctgcaaactgaagtctttggggaagtaccagatgtaagtcaaatggtcaaggtgggggctaagagagcagtaatcaagggctcccacagcctccactgcatggtttgtgggtacaggcatggagccaggataactgcattaaagcctttaagtctggctctccagggacctctccaatcccaaagagggctgtcaggttacttattaacaactctacacattagcaaagatacttacatgaatagtctacagtctgtttattgatttattttttattgattttatttatttatttattatttactgtcatttttgttgttatttgtagacttgttttgttttgttttggttggttggttggttggttggtttttgagacagccctggcagtctggaactcactctgtagatcaggcttggcctcaaattaaaaaatctgcctgcctctgcctcccaagtgctgggattaaagatgtacaccaccactgcctgcatttgtagacttctgattcctcgtgaacaactatataaattatatacatttnnnnnnnnnnnnnnnnnnnnnnnnnnnnnnnnnnnnnnnttcttttccttttttttttttttttttttttttttttttttttttttacctagggtttgcttgcttattaagaaacagggtatcaatgaggtggagaggtgactggcctgaacttcccgggctcaagtgatccatctgtctcaacttcacgagttctacattttttttaaagggaaaatatacaaaagtaggatctttaaatgtttggaaaatgctattttcaagaaaacagttaaacacatacacacatttcacgaaacatctaaatattcaaactttataatcctaaaatgtcttgttaacattttctactccctttgtagcagaaatgttgttcccatttcttcaaattagttttatgtttactttcatgtcatggtagattccacctgttgttagaatgaacacttacagccgggcgtggtggcgcacgcctttaatcccagcacttgggaggcagaggcaggtggatctctgagttcgaggcctgcctggtctacaaagtgagttccaggacagccagggctatacagagaaaccctgtcccgaaaaaacaaaaaaaaaaaaaaaaaaaccaaaaagaatgaacacttacagattactcttccccctttaacgtgtggctgaagaataccaccctaataatcagaaaaggaaatttaataagataatgtaatgtcacgatcaagcatgtggtttttatttttctgaaactcctatggtcaacaatacccactgataattaattttaacatcagcattaaaataatctcttataaattcacattggattaacaagccaattatttctacgtactgtcttgagaaattactgaaattatagatttagaaatgaagcattccctcagctatctcggccacaataacaccagcatgtaacacttattttcttttttcttctgcccccctcaagaagcagggatgttactgtgaggtattggtttatatactgacctctgtcacttgggtttgaaggacagtttctattgagtttaaaatatctatctccatacattacagctaaatacctagaaagtgttgtgtaaattttaattttcannnnnnnnnnnnnnnnnnnnnnnnnnnnnnnnntgttgtgtaaattttaattttcaatccgtttttggatcaaagagttctttaaagattagagaactgagtaaactactttaaacgagtcagcctgatatgatctctaaaagctgcaacaaatctgacatcttaatttccagcaaaacttctccagattttagctaacttagagttgttttcatgtgtcaagagttcaagagtggtcggtgtttaaaataacatcctccctctcccaatgtggagacacttgccagcacttgggaggcagaggcaggaagctcactacaagttcaaggccactttggtttaagtaagtagcctgggctacaagaggtctcataacaacaagactcgattttgattgggaagtagctacaagatggaaaaattcagtggcactttcagagctgctgtctgacttagtagtggaagaaaaaggtattctcttactgtgcatgatccaaagcaaaccaaagaacaacatggctctaacaggagccttagaacaatcaaaagagctacacttatttaacactgtaggcttttcaacgttggaacctataagcagatttcatgttcaacgtctcgaaagtttaaatgaactcttccagccttgaaccacaacaagtgaaaatttggaatatgttattaactcctaatctttttcgaaaccgactttactttgggcaagtaaccatccctgtcgccgccgctttttatagacagaatttctgtctgaaagatcatctttctaactcagtctggcttgatgttctgtgttagtcaccctcgtttctcttaaatctcacttctcccactatcctagttaacatatattttcaggacttttaacccggttcgctttctccagctatgcacctcttcggcagctggatcgccctacttttttcccctatcgcccaggttcctctaagactatgctaaacattagaccgagcacatgacctccagtcatccaggatcgccacacgccggccctaaaccatgcgatgccccaggcttacaaattaaaaccgtcttctggcttttcctctcctagtgaacctgcagtgtggaaatttaaatttaaaaattttttaaataaaagaacccgctcccttttctctacccccttggccccgcccacgaacccccctcaagcctccacgcgaagccgcaggaaaccggagggggcggggcggtgacgtcacgacgccggcgcgtcacggaacggcggcggctgcggcgctggcggtggctgcggcagcggcggcattttagtctgcggcggcagcggctgcggggctgctgnnnnnnnnnnnnnnnnnnnnnnnnnnnnnnnnnnnnnnnnnnnnnnnnnnnnnnnnnnnnnnnnnnnnnnnnnnnnnnnnnnnnnnnnnnnnnnnnnnnnnnnnnnnnnnnnnnnnnnnnnnnnnnnnnnnnnnnnnnnnnnnnnnnnnnnnnnnnnnnnnnnnnnnnnnnnnnnnnnnnnnnnnnnnnnnnnnnnnnnnnnnnnnnnnnnnnnnnnnnnnnnnnnnnnnnnnnnnnnnnnnnnnnnnnnnnnnnnnnnnnnnnnnnnnnnnnnnnnnnnnnnnnnnnnnnnnnnnnnnnnnnnnnnnnnnnnnnnnnnnnnnnnnnnnnnnnnnnnnnnnnnnnnnnnnnnnnnnnnnnnnnnnnnnnnnnnnctgcctcccgccgcggacctccagccccgtccgtacaggaaagcgccggtcccggcctcgccgctccgccttcttcctccgcgtcgccgcgcgggagcagccgcgggacccggccaggagagcccgagcggggcagaaccgcccctcacgccgccgccgccgcctcctgcgccctgcgctccacccccagccgggcctgctgaccgcgccgagcgccgggctggactgaccgcggaggctgagctgttggagcagccggcccgcccctggaccacgctcgggccgtcgctgaggagttgaattgaggcacccctgccgcgggaggtgaggagggaggaggaggatgtcgcgccgagacgccggcgcccagagcagcccgtgacttggcggcgtgggccgtagacccaggcgcgaactcggactttgtctttgggggcccgtgctcggcccttctcggtttccggtggggtcccagaggagcctctgccctccagcctcttccaccatgtccaagatgccggccaagaagaagagctgcttccagatcaccagtgtcaccacggctcaggtggccaccagcatcaccgaggacaccgagagcctggacgacccggacgagtcgcgcacggaggacgtgtcctccgagatcttcgacgtttcccgggccacggattacggcccggaggaggtgtgcgagcgtagctcctcggaagagacgctcaacaatgtcggggatgcggaaactcccgggaccgtgtccccgaacctcatcctggatgggcagctggcagccgcttcagctgcgcccgccaacggaggcggcggtggcgtgtcggcccggagcgtggcgggggcactcgcccagaccctggcggcggccgccgcttcggtgtccactcctgggccgagtagtgcaactccatctcagccccctgccacttgtagttcgcgtttccgcgtgatcaaactagaccacgggagcggggagccgtaccggcgcggccgatggacgtgtatggaatactacgagcgggattcggatagcagcgtcctcaccaggtccggggattgcattagacacagcaatactttggagcagactgcggagcgggacagcggcctgggagccaccggagggtcggtggtggtggtggtggcctccatgcagggggcgcacgggctggactcgggaactgacagctccttgactgctgtgtcacagctacccccgtcggagaaaatgagccagcccactctcgcccagccgcagagtttcagcgtcgggcagccgcagcctccaccgcccgtaggtggggctgtggctccaagttcggcgtcgctgccgccgttcccgggagcggcgaccgggccgcagccaatgacagcagccgttcagccaacccagctccagggagccgtggccggaggcgccctccccgggcctgtcggtcaggggctgccgccgccgccgaatgtcaacctggcgcagcctgtggccctggcagctcagcccggcccggccggcggctcctcgttgtcacagcagttcgcctatccccagcctcagataccacccgggcatttgttgccgatgcagccatccggccagagtgagtacctgccgccgcacgtggccctgcagccgccaagccctgcgcagcccttgtctaccagcgctagcgccacctctgcttccgcggccagctttcctctggggtctggccagagcgtctcctccttgggtgcccagatgatgggcgcctccgcccagcccagtgaagctgtggccccgggtccggttcctgtaggccaggccgctccttgtcagccggccggagtggccccagctgctctaggaggcgtggtgcagccaggctccgggcttactggggttgggcagccccagcccgtgcagcctccgcagcagatgggtggcagtggtcagctgccagccgtgcctggtggtcctcacaccgtggtgcccggagttccaaacgtgcctgcagcggtacccgttccaagcgtgcctagtgtgcccaccacttctgttactatgccaaatgtacccgcgcctctgggccagtctcagcagctgagcagccatacgccagtcagccggagcagcagcgtcatccagcaagttggttcacccttagctcaaggcacacacagtgcaccaacaagtctaccacagtctgacctaagccagtttcagactcagacccagcctttagtcgggcaagttgacgatactagaagaaaatcagaacccctacctcaagcaccactttctctcattgctgaaagtaagcctgttgtgaagcctccagttgcagatgccctgacaaaccctcttcagttaacacctatgaacagtctggccacctctgtattcagcatagctattcctgttgatggtgatgaagacaggtatgtacatttttttaaattttgaatatctgatagagttgcttgccccaaatatcttaagatgcagtttggggagtttgtttccacttagggtctttatttttaaaacttaaatttggtaaaaatcaattcaaagttttgaagtaaggagacaaaagtcacgggatttttgttgttgttgttttgtttttgttttctttttaagcaattaaatggatagtgattcaacatgattgatgtatttcagcttaatagtttgaagatgagagctggtattgcccccccccccttcagtaagaaagagggtccctttctaaggtagtaaattactttttaatgtttatggtagagttttgcctgagttggtaagactgaaaaccagaaagccttttcctgggggcagggaagtgatggaatagaagcagtctccatcagtgaatttggaagactggagagaatgataaaatgtgaagtctagctttgactatccctaagtgagtctatagaagggggtcgtgagaattcccagtaacttttcaaagataatatttttgtttaagcaaaagaggaaaaaaagcaaagaaaaagtactgggaaaatggatgttctcctatcagtctttagtgtaggaaagggaggtgtggaatgcttaaacagtagtaaaaactagagttttgaaatgtctgtaaccaactccctctacctagagtgtaaggattgcttttttaatagtttaggtaaaaattagtgtattactacactattcaatagtggtggtgtttggttgtggcctacttaggaattgtagggggttttttggtttgttctttaggagctgtcacatagacctttgacattacataattccaaccttgttaaaaacttaattgcagtttaacactacattaaaaattacagggaaagagttgggtatcttcttacattgtatgtttttgagagaggttaattttaggagctaaaagggtcagaatttggtatgatctagaatcgttagttatgtagaagactaccatgaaataataaagcttctcttcagcattttagactcacacagccttaacttttgacttccagttatccttgttttattttatatatatatttctgctagtttaaaaatgctgactggaattcattcatcactgttttttgtgattcagaattcatgatttttgtagtcaagttgtgggaaatctgttgcacttgagaactcagtgttcttaagtgtgctagtcggccagccggtcactgaaacatttagtgggattaaaaaaaaaaagaaagaaagaaaactgacttcatgagcaactcaaaacaacaacaacaaaaccccctctgttctctagttgctcctattttcaagggtagggccacatataacaggaaggtggagtttacctttcacctttgatggtggtcaatagcaccttatcttttctagctagcagcaacctctattttctaagtaagttatctttcacttaccctctttgatctatacactgtcctgtctctcttcaattatgacttttccccaatctcttcttttacacataaaacctatgactgtgaatggaaagtacatctttcctcttcacacactttacagtttacaacgtctacagttacagtcttcagaacttaaaagtataattatatattattgaaacagaaatctgttggcaaatggaaactctgaaacatattcctgttgaatatttctacagatgcatacatttttccttactgtagagaaagttagtaatctcagaaatcttacttccaaatatgaatgttttcactccagatagtgctatgtcattgttcttgcatcagttggtccttttcaagggtttgattgtggtagccccattttaaatgtgccactttaccccagtcttaaattctgcattgcatatttatcggtttttccgttttttaatatgctagtttccaagatgtaatcttaacacacttgatgttttgtcactagaccaacacacctggtgaaggaatgatccattaattagaaatagggtttggttttgtttacttgtttgttttaaaggaaagtctgtgtaaagaggtcattctgaagtttacacatgggaataatagttttccaggcacatgtttaaattacccagatgaataacttaatagaaacaatactaactagaaacattacttttaatataatttgaggttaactttcttaaaatctgcagtatcatttataatacttcaaataaaatataaattggagagttcttgaggaattaatgtcttaaactttctgaataggttaacacatttagatcctaaggaaatacttgtaaatactcattttttgttaaaattccaaatttagtaaacaggtcttagttcttttgtttttaaacaaaatgaaagaaggtgggaagttaacaaaaggtgggttttaggttcctacattggaagtcttatcacggtttgattccatataaaggctaatgcggagtccttatcattgtctgttgaccctatattattaagtaatcaaagagtgagatttttccagccattttgattggaaaaatttatggctacacattaagacttctcacattgaatttgtataaactggtgattataatgatgattgataaggaattatgtagccacttttatagtgaacattacaaactttgcttaaactgcctgtatgtttaacagtctgctttactgtaaatgagaggacatataaactatcactggccctaaatggagcacagtacagattgttttccataaataactgaccagtgttaactcagaaggtagcattcctggaactcatgaatggctataattgtgaactgtcaactgtgtgacagttgaaaacctgattattgtaaggatcccttagtgacacgttacttagtattgttagtttaatttgaatagtttgctaatgtctagtaatgttgactggcatgtgttggtatgtgctgtaacaaatttgtccatatatatttagttaatggatttcacatacatttaatggatctctctctaaaatttgaagtttaagtgaggatttatttaaatatataccaggaacaacactgtcctcttggtgtaaaatgtattgacccccttttaagagctatgttacagaaaggtctccttgatcttcctgtgtataaatttaaaaatatgaacccttcttatttgaatctgtttctttggaccttaactctttttttttttttttaatcgattgcatcatggaggtaattttgcttttccagctttacaattaaagagtaaatcaccagcaagatactgtcttatgccaagctaagactttgggaatgtattcctactcaggagttggttggtagtcaaagtataaaattagatgtgaatataacattatattttgtataaaaactgatagtggtacagtcattagaaatacctagttgctaaaatatacattagttgcaaacatagatgtaaataaaatatatctgaatttacagattttccaaaggagctgaaattcctacagctttatcaggatcttgacctttcatattcatgggaacataccttttttaaattgagaaatagttactatggaccaaatgtttgttactttaaagaaaatatatgcttatgtgtatatggatgaaacacattccaagtaacatttttgtacaggtttttttcaggtaggtgaaagaagggtatggaatcataaatatactaaatcacctttgtgagaagtaattttacatagtattagaaatagatgatatgtatctctgagaataaatacaccatccgtctattctttaaagctctgacagcattcatttgtaattggtatgacactgggattaaggatttggttgtaatactttggagtggaatttatcttttttgcacaaggagaggttagatgcagatattaaacaaatgttctcacactcagttttcttgatagaggaactggatgtgaggaaagtaaaaaagaagttttaatttttcatttcccatgacggcctgaacttaggtgtaggaaagtattgagtgatggcaaataaccaagatgaaagaaaatataatagagtatcatccagtttggtcttagaagaagtggacttttcaataatgaggatggactaatagtctgattttttttttatacccttttacttttggataatagttttagaccatttaagatactatttactaattactctttgctataaggagaaggggctttataaaagccagtctgtctaaatgtcgtctaaatgttgacccctcgattcttatgcaaaagaatacaagatttttttaaaaattagaaattttaattcttagtattctattggaaaaaccttaaaggttgtagttttttttaatattcaactagtttaaaattattttagatagcacaatcctgatgaggtacatctacaaaaaaatgtacatacataaatcatttatcttttcccatagcaaatcaaagacacactaattattcaatatttgtatgttctttcttagtcttgtattgctttaaaaaaaaaagttgccttcttggtaggcagaggcagaatctgtaatttcaaggccagcctggtttaacatagtaaggcttgccagggctacgtaatgagacaccatctcaaaaatcaaagttatatgcctcccatgaagatttactagcttgccttatcatgttatggtattaataaaatacactttaatgtgtatagttcaaatttgaatgatgatattgaagatacataaattggcttcatgtatgttgctctgaatctttcaaattaaaattagcttcatttaattttatttgtatgaatgttttgactgcatgtatgtatgtgtatcacatgtgtttgctgataccagtggagaccagaagataccaagtcctttggaactagattaacagatggtatgggctgccgtgtgggtgcttggagtcaaacccactcctctgtaagaggaacatttgctctaaactactgagacatttctccagtcccctcccctctcaaattcaatttcaaatttcaagttcaaaactccaaatcaaacaaactgtgcgtctgtgtgtgtgcgcgcgcaaaatcagtatgcaagttactgattttattgctatatacctagtatttactgtttgttagactaggcaaggcaagcaagtgaaatctgattgttagtttaaattatggacagtctccttgtccataagtattcactaagatatggttggagttttacactatagaagataagctttttctggcaaatatatcaattataaagaacgttggaatattttaaatctattttgagtgttttaggcagttactttttattaacaagtaaaaggtttaatatgtaataaaggattttaaaagcaaattttaaggcccattagtttttaaagagagttatagttttaccattttggaggttatgtatattaaaccaaacaaatcctttttatagtttacctctgccatggaaacaagcgaaaatgaaaaagggttttcttttggttaaatgcaatcaataatatgtttgtgtattaacatatgaatggccatgactccagactattgaattaaaatctgttgctgtatatttggaatattggactttaagccagtcacttagccctgtgtaatttctgcttctttatgtgaaaaatgaggatacctgccttggagatctcagtcttaattctgggactctttattacagttcctcgtgttatgctgacctccaaccatgaaattattttctttgctattttatagctgtaattttgctactgttatgaatggtaatataaatatctgatatgcaggatatctgatatgtgacccagtgaaagagtcatttgtcaccccacaagttgagaattgctggcctaatattaaattttatgtgaatagcctttaacataagaaatttgagtaagtattcccatcaccactatagattatcccttgaaatagtatacatttttcaaagtcttcagttttgatatacaagtataagactgatatggaaagatgttttacctgcatgtgtgtgtgtgcctgctgatgcccatggaaaaggagaatactcctttagtcatgatgtaataagagttatagcaaattgtgttctaatcttgattcttcaactgctttgctgatttaattgatagtcatttaattcccctcagctttcccccccccttccatttgtaaagttagaatttgggtcttactcatattttaaagttctgtctagttctattgagcccattaaagaagaaattgggaagaaccttttgtcaaaatcctctaccactttttttttgctattaccattgtatgattggttggttggaagaaaatggagcttctttatccaaatactccagaagtaaattgaatgcaaaataagtagctaaaggaacaatttactaatcattcagtttttgttgattctccaagttgtaaacattaaggtacagaaatgagattctatttcttctaaggtggcatcctatatgattaggttatctatgatacatgtgttaggtgttgatggagtaaatagtatatgctagtggggaatggtttaagaaatgtgatttcttaatacaggctgacttctgtttagacattgtcttcaagtatgtatatatgtatgtatgtacatatgtatgtatatttgtagttcagaacttaaaataccaaaaccaggataaatcaaaaacttcttacctctgttctccagccagccagttttctgtcttcagaatcaacccaatatttgtacattctctgagactaactcttgaactgagttttaatttaaaaggccatccacatttgatcactgataagagtgatttgctaagctcagagaagtagcagcttgtgaaatgaaattgaagagtgaaaccgtcatacttgattaattgacaagaacagtgaagggcttaataccatagtaaatttagatttttactttccagttgctatttaacagtattttttgaaacttttattgctaaattagtgtttctcttacagcttacttcagtatttatttcagtgattattgtattatacgttaaaatgtaataaacttatgggggcttgcgttggaggcgttgcactgaagcccaaaagtcagagctgttacttggcaaatatactaaatagttttcatgtacctaactctaaattttaaattattctttttgcttcaacattaccttgatgatgatgatgatgatgatgatatgatgatgaaacacttgatgcatgtcaagattctgtaccaaaagttgcattttgtatagcataaaattaagcttaattgtgtcaaaccctatataaacataatcttatttggtctcttcaatgacctgtaaacacatgttttattctcttttgtggactaagaaaagatgaatacttaggaatgacactcagaaaccagtattcctttgctttagtacttagcaaacaatgaatgggaagaaagcaaagttacagtaaccacaataattggttatgttttgacctgaaggatatttacaagtgcttagttcacttgtaagattggaatggcccttaatgatttttttaaattttgtttggtttctatgtaatcttgaaggttgagttttgacatattttaagcttcaccaactttatggcttttagatgtgggatatgcatatgtgtgtttcttttccctactacagttaacttacaaatagagtatcttgctaaagcaagtggatatttgttatatgggttttgttactttctgacatactatttttcatgaactgggaaattaaagtgacagactagtgtatgaagccagggactagagaaaaaaaagccattgtaaataccaataggcacaattaaacaattactttgaaatgacataaaaattgaggggactaagggcctaaggaaagctctattaataagattatttaaatgctaaatgaaaattaatagcacaaagatgtaactgaaatgttattaaacgtttgtgcatttttgattgtatattttcttctgcaagaaattacattcgaaaccagttttctaacaactttcttgaagtgaatataaactactactattgaggggtgataaagcaattcttagaagaatgagatgtagtttatattgaatttattgcagtttttaaatgaaacattttttaaaaccactgataaaaatctatccttccctccccttattgtactttatttcataggaccttttcataccctaatgtttactgttaactttagataattttttaattttataagaaatacattgaaaaaatggtagcattatgtgactttgacaccaatttgcttagggggtaaatttgcttcaaattaaatgtaggtatttccaaagtcaacatacctgagggtttttttttttttaatgtcatctctctgagtagatttaatttcaaatactctttataaagaagctttaattccaaattgggcactagcttcaaagttattttcctctccctctctgccttcttcttagagttagttatttcattaaagttgaagtttctaaacaaaatataaggaatagcaaaccagtttttatatggtcctgggcaggcctgatttagttggtggtaggaggagccaaattaggtttttcagatcttttgctttctatcttagtgacttaattttgaagcacagtgaggaaaaagaagtagcttaacaaaagttggaaaaggttggaatcctcttcaattttcttgttggaagatctaatctgtgcttctgatgaaaggattcaaagaatagaaaggaaataagagagtagggaaagcagtaaggactacattgagagtcctaattaatccaacaactacttggctattctctgttatccagtgtcagtgtgtcttttctggtttatcaaaaggggtacctgttggttaagatctaaacagttttctaaaacgtgattgtgtatacatacagcatacagtttgacacagttctggttttgaagtcacgattttgtttttagtttgatgatcatttttatatttaattgctaatgcagacaactttgtaaatagttctaaggtttttttgttttgttttaaattttcatttatgtgtatatgaatgtgtgtgtgaatgtatactatgtgcctgccagtgcccatgtaggccgcaagagggtgttggatctcctagcactggagttaacagtgaattgttgtgatccagctgacatctgtgataggaactgagaaccagattgattgctatctcctctgatattttggaagttacagtcgtgtgatccatttctgatcagtgagatagaatcagtaaatctgagccctgttagaattgttgtggaaattgagtcagtcagtgtaaagtagtgtgaatagcatctggtatataacaagcttgttgttagctgctagtcttatactaaagcatggatcaaagttgttttttttgttttcttacggacccagaagaatgattgagtgagttggtgggtgattgattcgacataagattccagggagttgggagttccatgcagttatgagaggatcctggtagttaaacctgggcccttagcaacagcacttaatgtgctctcaactaggtggccctctttagctccaagtcagggattttaaagtgatgtaacaggtacttgttaactcccatcaagtacgggtagatggtgaagaagacattagaattatgcttaatgacagaaaactgttaggaaaaatatgtttcttaaaagtttagctccttgagaaactgttcctatcatagtcagttgtacatattggagtttgcctgcatcagctcatcagttacttacagttctgttatgttggccctaaggatagaaataagtgatatagttgataggtttttacccttaaagggacaataaactaatgctagaaattaaaacactgtcccacaattgccccccatacacatactaacccaaagaaactgcacacaaacttacagtggaactgtatcatgagcaaaccaggaaggaatttacattatttacattaactgtcttttaacaaatactagaaagctgaagcttagtgttgtatctgtatacactactagagaacaacttaacagctaaaatcatagactattgttaaggcatctgatacaacttggtgttgataggctctgaacggtcacatcgatcgatatatatatgcacacaattgactattagtagttaactttatctgctattcttccttttagaactttgatcctgaattactgtgggttctggagtgtgtgtctgtctgtctccaaagtattgtttataaacaataatctttttctttttcctttttcaagtttaagtggttacactgtgtaggaatctaaagtcttccatttttttgtaagttctgattatactgtacgttctcaacttcatttccatttgattcttgggtctcacaggaatccttcaactgctttctaccaagcgttccatttgaacacgtgtcaggaatcaaagagcctctgggataggtatgattacttgatatggaatgcatacatgcaaaagtgtatgcatgaattgctttgcataaaactgatctttgctattttgaaggggattgaattacatggtatctatcatgggacaaagcagcaaaataaaccaaaagactattttctataaaagtgtaaatgtgctttttattttactgcatcctgtccatattatatctatcttttttaaggatttgcatctttgtcttgaaatagtcacataatatatcttaatacaaaacatttttttctgttaaattggtcttaatttttgtgttttataggatttataaacacacacacacaatattactgcaaactaaaaaactggaggagggacaagacctggataacaaaatgccattaattttgacaagaaattgtcatgaagtttgcttattagaatttcatagatgtgtataatttgtaagccctcaaaacaagtttttgttttgtttttaaccagagatactgtttaggtcttatctttcacttaaaagaaaacttgatttcacttttggcaaaagatactttggtttatctttctgcttaacacacatttttaaatagtttatgctttatttagttatttggctgaatatttattagcaatctatcattcagtgtttaattaataggagttgagcacagtggtttttgttttgttttgttttaaattcccacaaagcttgttagattcttttaactctgcctggcaacgcatttgtgtcttctggcatatttttggataacactcatagactcaactctctctctctttcattagaaaagagagttgctaagtgcatgtacatgtcctattaagacatggtctgcattggcttaatgggaaatggtaaaccttttaatctctaggcttgatttatttatgtgtataactctaaagctattttctaaacaaagtatcttgtagatgatttgttccttacttaaccaaaaatcattttaaataatttttaagagaaagttttaaaattttgtagtactgtgtttatgtataatcgggctttaattggttttgctctaatagtataaagtattataaataaatatataagtagattatagtatgaaatactatactataccatgaagttttagtcattcaaatagtacttgaggcgaaccttatacttttcctgaatacaaaagaaatatagtacactgttcaaatataataaaagtagctttaaatgcagtttaattatttgtaatatctgtctcataagctgtcatgtcagtatgaatgctgtatttttgagagaggtttgatttttattttcaataatatggatctaatatcaaaatgatctttataagtttcattataagacagccatagaagttacttgctcataatttgttaacaatgaaatactaacttgttctctttaatagataccaaatccttttaacatatcagaagtgaggcaagttgctgcatctgtatcgtttcttattggttaaaaattatttctgagctggggaaaaggcagatgtagcaagccagacactagaattatggaaacagaacactcccaggatcttactggcttgctggtcttcccaatatagccagttagtatgatgaagatttagtgagaggccttgtcttgaaatagatgggatagagtaagacacctgatgttgacctctggtctacacacacatatactctaataccccaatatgtattttctctttttggatcctgttatctagaactaaagaagtttagtggatatttgtactgttgccaatataatcagagcttaatattgtagatagtcttttctgtaagctggactgattggtaccaaggtaaaacacaatggaaacttgagaatagttttcttttaacttcttatatgaaaagaaaattaaatgtgggctggagatacgacttagtaatagagtaattatacacatatgttcacacatagacacacaagacacagtggaaaatgaccagctttattagttctaaacaaaaatagagaacagtttatacaattttatttggcacatccctataggcttgttaagggacactgagaaagcatcgtggttctatttattcataacagatgggttaaaattttttgtaatattaggcttaaaatagtaattacaacttttggctttgttttggatctcaccaaaaagcctaattttggactattgtaaattgggaagtttgtcttgtcttgtcttctcttgttttccttttcttctttcctcttctcttctcttctcttctcttctcttctcttctcttctcttctcttcttacttttttacaattttccaggtaaatgttttacaaaggtaattaattcagtgttaagtagaaccattcaaaggtttattaagacagtggttctcaaccttcctaatgctatgaccctttaatatacaattcttcctattatagaaaccccaaccataaaactattttgttactaactcataactaattttactactgtaatgaatcataacagtaaatacctgatatgcaggatatctgatatatgacacacacacacaaagagatcacatctacagattgagaaacactgatttaggaggccatacgtcctttatatgatctatctatgttatttacatattttgaagcataaattttcatatccttgttgcctgataccatatttcaggcttctgtttctgaaatcttggaatgatattgagtagaggtaacctttttaagatttatttggattaggcagaggtatgctacttgtgtgtaggtacctatggaggccagaaaaggacatcaaatttggatctggagtaaagatggttgtgagctatcatggatgctagtaaccaaacttgggtcctctggaataactggaagagctcttaaccattgagccatctctctagtcctggggatactttaaaagccaactttcaagctagctttaaataattgtcccagaatatctgaaggtccatgcttgcagaaggtccatgcttacacccaattttaaggactgaaacctttttcttcctgacaggatactatcaatttgtcaagtctttacaatcaaaataggaataactaatatgctattacatattaacttgccagttctcctttgtcacttcctgtatttaagttagaattaacaatttgagagacttttaaaatagtcagatgcctttgtctatattcagatcttttctgaggtgtctagtgtttttcttgcttatgtacttaaattgaacccttccttttcatcatttcgtaggtaccattatagtttgtgttccttatttgtcagttttgcagagacctcagggccagttggttaaaatatctacaaatatgaaaagagtgatactatagccccaaaataatccaaccctttcctaagctctgttcataatagtgtagcttatataattagttttctaggtaggaggtaatatacttgtgaagtcaattttctgtgatatcctcacatactagcattttagtgatactaaattttgattaccttttaaaaattgtgctcattcttagatttctttggtctacctggttttttgttttgttttgttttcagaattagtttagaagcctgtttcaataatcattgagaatcaaacatcattaagaggttttatctatgaaagtttagtgtaggaattatagtagacagttttaccatctcttaatggcatatcaggaagataaaggagtgctagagaaaagaacatttagactaaagggagaaaaacagacggcttataaaaatttgccttagggataagcacttggagtgttttgtcttcatgaagaaatcagttaaaactctggggaaagatgaccagatacatgacccacataattaaaaatgatggctcctttataatatgcaagcagtttcaacttcataaggagagttggagccattggtcaaaactactttagaaggtagctttcttatttgaaaagtagatagagtttgttattacagagttagagaactgaggaaaaggagcatttcagttagagaaacagtactgtggattagtgtgcagatagatattatatcttatgtatttgtgtgggttagtataataagaataattagatttgacttagtatataaaagcaacagaaaagaagagcttgattgaacagagaaaaaatatgattgtctgaaagtaggaatcaattagtaaaattttacagtgcatagattttaagcacccaaagaactccaaagtgtcaaaaacccagttgactgaggaaatgcttatattataggttgcattaacaaaagaattagtttagaaaagcgtacatatattgatgaggtttatggttttagctgtttatggattagttgacagaccattagaaatgatccaggtatgcaattgcatagagaaataagattagaaggttttttcttcttcttcttcttctgtaaagtccaaacttcaaaagaggccaggatcccaaggaacagactaggataagagtaacaagtaacataagtaggatatgggtcaaaccagaaccttaagcagcaccacctaacatttagagactagaatcgagatagtatgaaaaaggtgttttagaaatgggaacactctgggaatattgcttcctaacaaaaaagaaaagaatgtttgcatctgctcttaggcagattgtctgcttgctggagtttgaaccatagtcttaagcttactctttgcattggttcctaggtaatgatttttttagtttttctatagttcattcagaacacttgatatactgatacctgttttctgcccatcgatagacttcagaattgacaatcagaaatagtttagcaacttactcccgggctaaaacggttttgtttcttcctttaccacctgtctttgttgtttaaattactccacctaaatcatccatcctacttagagagtgtggtaattatgttcagtgtgaaattttagatgaattaagaagttattatatatatttctcactaaattctctggttctcagagaaccagagctttaaatagcagaaaattataaattaattcaataacctagtctacaaaatctagaactttataggaaatatttgttaagagaagccatttattagcctggctcagaataagagaaaatttaaatgcaccctaaaattactaaagtaaaacaaacagggtgtcttttgttattttgtttttccattatattcatcagctgcttaaagtttaggttcatacttcaatatatttaaactcatgtatagtttgtaagccttttgagaagaaatatcagatgaaattgtaattatttttaagatttggagcagtgagagagatttaaactatagctagtgttctttatgtgcctgaacacacatgctcatgctaaataaaataaataaatcattgaatattttggttttggtgatcaataaagagaacttttaaataaatgctatggattaccaaaaatcagcttctatgtttggacttttagttggctacttgtaaaatatttgttttatttagaagaaatacattttaatagaagaaatgaattacagtgtttactaaatatccttaaaaatagtatttttgttatgacagttttatctcttcaaaatttgaagattcattataagtatgaaaagatttggaggtgctacttttttgttttggtttttttggggggcgctttttaattctatagtatttgagtcagaaatagtggtatcctcaatatattaaagtatgtgtgcgggcagtatgactgtcactgtctatagttagttatttatacttatataagtatataatatacttgtcagtgtatattgtatcagacatggtggcatggacttttaataacagcattcaggagacaaaggctgatggttctctgagtttatggtcagcaacttccaggaccaccagagctatgcagagcaaccctgtctcaaagaaaatcaacaattcagagttgaatatgtagtttcccattaagaaagtatgaggatttctttacatattcatgagtagtatatataactggcctccatttactttgttattccattttatccaattttaatttttttattgttattacaccctttgtaaatttataaatgtatatagggctgagtgatgtgactcagtgttaatgatgagtttgcatcttatatatgtgaggctctggtcacaagccttatcactgaaagagaaatagaaggaggatgggcaagggaaatgactcagtggttaatctttgccacgcaagcttgaagatcttaggttgattctcagcatgtatgttttgaagggggtggagaaaaaccagcaagagcaacacacacctgttcaattccagcactggagaggatccgtgggcctttaataaaggtcagccaatgagaagatcctagttcagaatctgaggtggagaactgatggaggaagacacttgatgttagttttcggtctccgtatctattccttgacacatataacacatacatacatgttgacccaagaataaaaaatatatgtcagcatgtagaggctttttactgtgtcataatatattagatctaacatttgttgtagtttctatgtcaatttctgggaacatgtggtcttctcgtgcttttattctatcaggactattaattgcttatcttagatgtttaagttcatctttctaatacataatctatggaaaaactatatgtaaaagtgtagggaactttgaatagccatgaaattatatctacatatttatggatagttgtatagaatttttagaatactttaaaagaaatatggtttatacttaaacatggaattgtgtttgactctaaagatactcattcaagtgacaaaaaggttagggatttgcctgtcagtggtagagcattcacttattggcacctcgtttgtcaagcgatttttttcacaaaaagttatttgggaaatcttaacaagcttattattgagtatctatcactttcaaattaatatctggaaattttaagccattcatctgtgccctcctattcattgttttgttctgttttattttttataaagaaaactgagctaagttatggtaatataaacttagttcttaacttgaaactttcaaaagcactttgtcagttaagtgggatttctcttcctaacaatagaaatattgttagatcatggttgataatgttaaatgattaatctttattcatctataaatacttcagctaatttattttagaattagacttttctaccatttggaacttaagtttgaagtaatttgaagtaactcttcaaatactaccctgttctatataataactaattctttaaaatgtgtgctaaaggaaagaaatgaaatggaagttttgtatttcttaaacatagtttttaaactctgagattatatttgcataacatatatgtatttattttatcctataagcttatcattaaaataacttgccttatatatggctagtttaattctatcttccaaagccttcctaggcacttactgtaatactgtgttagttagcagactttaacaaaaagtcagattgctcattaaatgaccaattcattcaggccttctagacaagcaagttaccaatgctatcaatacacatttcaagaagcatttagcttattaaataggactatatattttatcttcttgtgagatttttcccataacagagtaaatcatcaaaattagacacttttaaaatagtgagtgttttgattgctaggattataactaaacattttcaaagacatttggtgatagttgataaagcagtcacagctttggataaatatggatttttgccttcaccaggtgatttcattataaacttatgtgttcaggggaaaaattccaattcgcatgatttttaatgaagtcaagtgcgttgtgagattacatttggaaagattgtatttgtaaatagccacatatgatagaaaagttccattcaaaggtaaaatctgtggtagcatagtgcacctcatacacttaggtcagataccttagatagctgcagagtttcctttccaagactgtctggagttttgaacatactgatcttcctcaataatgggtctctttctttctccctcctctttgctcctaccatctacccattaaataattttatttagagtattatttaggtaaaattgtatccacaacttttgcctttgctgtggatctctgacaactaaaaataaaaatatgaattatatgacaggacatgtttttaatgatgtcattctttagggattgaaatagatgctcattaagaaactttctagcaaaaaaattaataatttaagaagatactctttacaagtagttttggccatttttaaatatttccccagtttccaggaccactgttgaataattcaggatatactatttttgtaagcatgtgatgaagtttgttcttaccaacatgtctactttagaaattgggagcataggcagacgcagatgtcggaataaacatggagtgctgtcttacttgctgacgtgatccatgcaggtttttatgatcttgccaactgtactggattagagacttccatggatttgggctagagagtagtgctccagtgcattctgtagtgtctatccggttgtatggtgttaaatcagaatttctggatcatgatcttaaactttaatggttccatttctatttgactcttcactgagaagtattctggtggcctggaactccatgttggaattttaagttttaatcaaatcaagtatttcaaattattttacatctaaaaatatcagttgtgtgaccatggtaaaacatgaacctttgctataaacgattttaaaggctatttgattacagcacttatttacttaaactctttgctagaattttttttagaattcagcatcggaggaggaatgtgacataataatgatcgaaagccgaaagtttaaaagttgtgatgccctcacatggttggagggttattctagcttctaaggactgaatgttgtccacaagagtgtctcatcaggtcataaattggtaagacttaatggattagattttatgtattatacctgatgttgttgtattgagatgactatatgaacaaaatgagcacgttgtgtaattaatagtataaaatataagttaaacttagaattttaactacttgattatgtaattatttcaaagtctcacaaagcccaagcccctgtctctgtagtattaaacaaagcagtttaaaaaagaaagtgaaatcctatatgatagtaacagtaaatatttttgttgcatctgttatagatgcttacagttcagtgaaagcccaaaataatttgcagctatttttccaggaaatatttgagaaatatttttaaaaatatatccattttcttcataacatactgcatatattaattttatttctttggagggttttactttcttcataaaggccatctttgtttctaaacacagccatttttttccaattttaatgttgagaatacttatcatggcagtgtcatgtgaaaacagtatattagatgtcagtatacttgtttttatatcttgaaaattaatttctctcagaatctctccgtagaagacaacttgttttatgtaccttccttggcttgttttctgaagctgtgttttaataaattggactcttactaggatttaggtcaggataaataagatctttatttttcatattttgaaaatgaagaaaaaaggatgggctaagttgtatatagttatagaactaatgttcttattaaggtattgtataaaaacactacaaagctatcaagaactatttggagttactttctaagaaagctaaaaggtgtgggttgatactaagcaagccactgtagccgttgcaactttatactcaagcagacataggtcttttgtccagtgtccccttagccacattcatgcctacactgtcttctcaataaaatcctcagttgtttctagtgtggtttttataactactctgtaagcttaaattccttcaagtagtaattgtgagtgtggaaataaaataaaccatcaaattctttattattctatatactttttgtttcttcatttttctataacaaatcttcataacccaaccaagagaatatctagtttgtctagtgtatgtttaatagttaaaggcttcagaaaattgtaaatttaggaatttaaggtagaatagtgcagtcttacataaaaagttaagagcattgatcagatctttaagagtagttaatatcaatactgaatatttggctctgcttggtggcatgtgcctttaatcctagcactccagagtaagaggtaggggatctctggagttcatcctggtctacacagcaagctctaggacagctgcgactacatagtgagaccttctctgaaaaataacaagcaaacaaagtgagtaggctttgttttaaaaggcaagccttgttagtcacccaggtatatgatttgcaaaaggaatttttaacaagtccattgatcctactgattttcactaataattgatcttaacagagagggatagaacaaatcagagcctagctgctctagttttaaattttcatgctgttcggtgtggtggcacatgcctttaatcgcaggacttgggaggaagagttaggcagatatctgagttcaaggccagcctgctccaagaaccaagctccaggaaagccagaatgacagagaaatcctatctttttgtgtagtggtgggcttaggggagggttaggatttcctccctccctcccttccttccttccttttctttcagaattatttattttatgtgtaagaaaacactgtacctgtcttcagccagacacaccagaagagggcatcagatcccattacagatggttgagaaccaccatgtggttgctgggaattgaactcaggacctctggaagagcagtcatctgctgagccgtctctccaggctcccaggaattcttacactgtcaatccttgtttaagttttgattcagtttttcctacaagctagttgtatttctactgctgttagacatatctcacttagtttttctaaatcataattatataaatcatctatcagtatccctgatggtttattttgttttgttttgggtttttttggagtttggtttgtggcagggtgcatggaacttgtgtaaacggggtagccttggattcaaaaaggctccttctttctgcctccaaaatgctattattaaaagtatgtaccaccattcctatcaaattttcttgttttgcagagaaggaaattgaagcatggagagattaaataatgtattatatagccattaaatggtggcactaggagtcacatttagttttcattggatatatatatatatgctctcagtatgctggcatggagagtaaacctagataacatggtggataagtttatattatacaaaaacacagaatacataattttaattctcattgaactagagtttaatgtgtcattctctattagaaaatcatcctttaattccaaaatacatgccatgaattgtatagtgtccaaaattaatttttgcattagaaaacattttgttcaagtttaatgcttatgattataagcaaataaatatctattgtaatactttttttttcttcaaaaaagtctttagcccacaagatagagaggttgaaggtgtttgacaccaaatccaatgacccgagttcaatctccatgattcatgtaagggtggaaaggagaaaaccctcccacaagttgtcctctgaccttcatgtgcacgtcatggcatgtgcatgtgtgtgcatgtacacaaacaaacactaaattaaataaataatgcaaaatactaaagtcttagttccaattagaatagtattacatgaaatgattgtgaaatttactctttaataatcaagttttataaatagcaaacaataaggaggctgttttaaaagctctaattgcatatattttctaggatagtgggaaatatatgtcaaactctctactaaattcattgtaagaatttctttgtgaatttttactttgttataaatccatggagaaatcgcatttatttttacttttgaaacattaagcaaagtttcttctaggtacatgagcctttaaccattttatgtgatttgcatatatctttttggttttaattttacatctcattgagttccaagccttataacattttgtttaaattttaaatatagagaacaattaaacattgaaagttttgtgtgctgaatatgacttaaagttgagcatggtgatacacacctcttaattctagcacttaggaagtggaggcaggagaattgaagggtttgaagatagtcaaatttgatgagaccctgtctctaaacagtagagctgttgatatagtttcatgatacattgattgccttaaatgtacaaagttttgggttcagtctacatcaccacataataaatgggaagagagagggatggtaaagtttaatccaaaatggtactgtttaaaacaagttcaagtcaaaaatactaatagtttgcagatacattcacattgtttgcaggaaaagaaactattcaatgccacaattaaaagtatataaacaacttgatatgaaatcagaatatgaaaatctttaaagtattatttttgggaatacatttatacctcatcttctttagtagtaatacttttatgttttcaaaaataaaactgtggaaagtttagacaaaaaagaagaagaaaaagttacctaatctaactttctaccacaattactgtcccagtttttatatatttcccttgagacttttgagttacatacataaatacacacatacatgcatacatgcacacacacatatgaacacataatgagtatgtgtactaatagtactaataactaaaatttttcagtacttttaagctaatataaagtaaaactcgtatgtgatagtaaacttcgttttgctattgtgacaaaacacttgagagagtaatttaagggaagggtttattttggctcacagcttcatagacctcaatccaagttttgcttttggatgtagagagaggtagagcatcatagtggaaagtgcatagtgaatgaaagtagcttatcttatgtcatcaaggaaatagtaagaaaagtatgaaaggaagggtcttgcacacataacatactcatcaaaagcatatcctatgatctacttcttccaactagagttctaagtcctaagagcgagcccattagcaccctcatgatatagtcaccacctcagcagggaccaagcctttgggagaaacttcatatccaaactgcattactctgcctcagcctccaaaaatttacagttgtctttaatgcaaaattcattcagtaaacatcaaagttccaacattgttccacagggacagtccctctaagactccaacaaattcatacctattagcctgcactaaaaacaaaaacaagttatatacttccagtttgcccacaggataaacattgccattccagtggtgaaggagacatagacatgaagaattgaaccaaaacaaaaccaagccccaggggaatagacattaaatcctctagctccttgtgtggcatctgctacatacagtggtatgatgtgcactcttacacacttagccagccctcactcctctggccttgctggttgcagcatacatgacctctctactgggctggctctgttcattgcctatggctttccttggcaaatatcctatgtttttgtcatctctgactttctggaatcttcatgtcagcttaaggataacttttacaacttcacataattgacttttccagggcttcccacagagattctaatcttgccacacattgcatggctttcaagacttcctttagatatcagtggaagtttctatggcttctctagaaagccagcatcacttagatgataccaaaaagatgattactaccatataacacatgaaatactgaagaatgtatatggtctagttagctgttcttatagctgtcctaattataagtataggcttccatttctggtcatataagttaaatagtactaatataaccatagttccaaaatggtaaggaggtattgcttaaaagaaatcacagttttaattttagaaatcacaaagatgtcttctctttgtagttgttatttacctcttagataatagttgtcttagttgttaataacctcttagggttatttgtactcagatctactaatactaaaaagagtaaagtgtcttggaatttcttcgtgctccaaaatctcatttactaagaactcccactaattattaggcattttaaaagcattatgaatctttatctcatctaagtaaatcttcaaatccttgtcctgtcctgctcatcttcagaataacttggcttcttttacttccttttagactcatttctgatcaatgtcaaagggattggtcagttgaaaggaattcatagataggtacttctgaaatatgattatgaaattcatattttcactagatttgatctctgaacctaataattgtaacgtgaaaaatcttcattatctgaaagattaggagtttagaaagtcccaagtttttttgtgaaatcttttattcctttatcatcatgctcaggatagaactgctgtgtttcatcatgcaatagccagcaaccaatagaaattgttgtaatcttttctcgataaataagaccaaatgtaaaggacattttagaaggagtacgcattaaaggctagcttcacaaccaaaaaaggaataggaagagctgtacttattgacttgactttctctaaccttacttgggagagctgctcctactgactgtccctatgagacttttctagtcacttttaatcatttaaatacctgatacgtttcttacatctttgtcctggcaagctctacatagcgccaatttcaaactgatcttttcaagtgtaactagataatatattaaacattacaagctgtgtttcatcattttctttgtaaatatgttagatattagtcatattcagaatatataagaagaccccctgagatggatagttcctgctgtcaaggtttacactaaggctacaattctgtttgataaagagaacaaacagaattgaatggtgaagaatcagaagactattgacaagacagagatggctaatgaaggcctgaaaggaacagatgtctttctaaattaatataacaaatatatcagatcatgatagaaattttgaattcctcataaagactttatataaaactgaggcccatagggtggttcagtgaataaaggtacctgccaccatacttgacaattcctagaaagaaaacaaatcaactccaatctcacaagttgtcatctgacttccgtaccgacacatcccacacaatacattaattaaacgtaatttttagaaaaaaattttttaaataacaaacatttattggtctcacggtagaaagtggctggagagatggctcagcgcttaagggcactgactgcttttccagtggtcctgagttcaattcccagcaaccacatgatggcttacaaccatctgtaatgggatctgatgccttcttctggtgtgtctgaagacaactacagtgtactcatatacataaaataaataaatcttgaaaaagcttttaaagattttacataagctgaggtaaacaattattatgacattcttccatttaaatttcactgttacctacaatataactcaatatcaattcagaaatatgattcagctttaaactagaaagttgttaaaagctgaccatgtgccactctttttaccattctttaatggaaaaacaaaatttgaaagaaacccttgtatattttcctagtgctgctttcctagtgcctttattctgcaccagactcttaactctgaaagtctaaagcagtaggactaggataataaatggtttaagcaaaacagcactgtatccagtgtttctgggtagttttgttattgttatcattttttaatatttattgttagagttttgcataacactaaaaaaggcccggaatattttgagttatacttttttataaattttatgttaaattgattctgttacattccaataacagttgttgattttttccacagtaactattatattttattattatatatttatattatcatattatattttgtaattatatttaattatattttacactgttaagctctgacaatctaaggatttagatagatttattactgtgtagtctacataaatgctgtttcttaagccttaataccaatttcagtctcaagttaatttcagtcttaagccttaataccaatttcagcctcaagttaattgtacctattttagaattgtatgaagtcttaaaatttgactaacagaacaaaaaaaaaaatcaaagttaatctagtaggatataattagaattgtttaaaattctttggaatagcaataaacatgttttttttttctttttttctttttctttttttaaatatttattttattatatgtaagtacattgtagctgtcttcagactctccaaagagggcatcagatttcacgatggatggttgtgagccaccatgtggttgctgggatttgaactcaggacctttggaagagcagtcggcgctcttaactgctgagccatctcaccagcccaacatgtttttaataactaagcgtaattaatttcttactatttcatggcctcaggaccttaattattaattcgtagtttaagatagttttaaaaggctgaccttacagggtcagaagacaaggtaactgtttcaaacagtagaatgaactaattgaatcttgtattttcataagaccttttgacagtcttccattagcatgcaataactgtgaccccccactttacagatgaggctggtcatagtctgttaactctataggatataccttctagtaaatggatagaagttagatgcaaaaacaactggaagctgaaacaggaaaattacatgtttgaagctaatctgggttatgtagcgaggtcctatcttgaacagcaacaaccacaacaaatttctaatccaaaagtttatgctcttaaaaatgtaatattctttgagaatttaatttttgacttagacaagagatgacaggtaggtaagatgttttacctcccagaatggctacatcaccatgaaacaaagagcaaaggggactttaatagtagtgaaatgatggcctagacagtattgtgcttaatctgtgctgtcttttatttgttaaaggtgttcgtttattcagagttaagattgtaatttttacacatctcaactgtaaaacattgattggtttattaaaaaccaaattgatttattaaaacacagtgtattgatacacaccagaaatcacagcactccagaggaagaagggggtagggttgcaagttttagaccagcctgtgctacatgaagaaatcctaaacaaaataaagcaagcagatattttcctcaataaagaacactttcctctctttccctaaggaacaatgactgtttggtgttattactttaatccacacaagaagcaagcaattacctagtcataaacctcaagatattctcttagagcttctgggtttaatccagttttgaaacaatcccttgacaaccttcatttttaattattgctaccctggacatttttatttattactaccatggatgagggtaggttatgagtgaaggaacataacatagcaaagaaaaaattagtaacctttgaatgtggtttagctgtggggtcttagtggctaatcttaaaacttattttttcatttgtattgtccatagagtttttctagaatgcaggtttaaatatcttttctatgaagaagtgagcataactgaaaatagctataaaatgggtaagaactatgtactcattgctatatttgaatttcactttagtttacagaggaatagtttgattttcattttgatcaagtctcatgtagaaatgggattgagaggatctgttcacaaatgtcaaggtgtaagaagcagtatgttaggttcttgagagaggagatagtttgaggctattgattaaatagtatttctaaaaaactatacatgctttcttaagcccgtcttactctgtaacctttcgcagtgcgcttcccattttatctttaattttaagcatgctcattttcttccacaggctgagctagctaccacattctaacaactcttagatctagagctcttggccccagactcctggagttctaggtacctacttcctgtgtcttctttctgtatttctctgcagggttcatatttcaggtgaaacctaaactcatttaacccctttcctactttacctaaaaatctagctgcctccattatcattatcattatcattatccaattccagattgtcctagtccctgtcccctgcctccttgcattttacagtagagtccctttccctcttcatctgtttgctctctcatggtctctatgcttcagttgcaaaacccctttttaaccttaagtacatagtactgttttatacctatgaatctatctgcttctgcttctctcttctttaacttttttcctaccatcttattaccaattccttcacagagagagaaagaaacaatattttacttggtaatactatttcataaaactctaaaaccaattgataaaggaatgtatatctaataagagtaatttgccaaaggacaaatgacttgaggtaaagccaggctacactgtatctactaattccatatctagtgatccgaccacccctagatgctgctaaattttcttataaccaatgatctttggctggcatccttggtatagaaaaggcagagtatgtattatctcataaagttgtcttttcaccttgaccataaaccattgtattctcctcacaggcagaaaataaatcaatgtaattaaagatttaaaaatattttcacttgttatgtttatggatatttttgcattcagggctgtatgtgtaccatatgaatgcctgattaccatggaggtcaaaagatatcaaatccctgggactggagttactgacagacgtgagctgccatgtgaatgctgggaatcaaacctgggtcctctgcaagagcaggaagtgttcttaacaactgaaccatctctcctgtccccccttttaagatttacttatttttattttgtgtgtatgaatgtttgtatgcatgcatatgaaatcaatgtaaaattttaaaatggcaagtatttatttagcttcaaactaaaaaatgaggaatgagattcagagctattttcaacttgatttattttgagtgtaaaattgtcagtgtccactatctaggaagaatcaccataaagaaacacagtaaatgtaggaaacagtttgggaagtgatataaaattgtataaaaagagaaagaggcctcacaattaacacagcaagtgacacgggatttaagtatacagatttttttaaacctttaaataagagaaaacttgagctgagagggggaaaaaattatcccagaagtacttgggaagaaagagataagcaaagatgctggaaaaaaaggataatagagcctttgccaggcatgcagaagacactgagccccagcctcagcatcatttaaaaaaaaaaaaaaggagtaaaggaaccttggagagggtgtaatgaaatgatatttgaaatgggtttaggaaaaaacaaagtagttcatttctgtgatctagcactctagatgtagaagcaggaggatcaagagaactcacagctaggggctgggcagtgagcacactggtacagagaggtagctgctcatccagaagactagacttcagttgccaaccccttctctgactctggcaccctcttctgaccttcttgagcattgcatgcatgtggtgcataaacatgcatgtaggcaaaacacccctacatataaaatataaaaagttcaaagttggtgagacagtttaccagataaaggccaagccagatgacctgagttctatatcctgcaattacttagtaggagagaatccgcaaccgcaagttgtcctttgacctcagcgtgaacttaaaagaggccaaagctagcctcgactaataagctgctacctctaggtaggtaggtaggtaggtaggtaggtaggtaggtaggtaggtaggtaggtaggtaggtaggtaggtaggtagatagatagatagatagatagatagatagatagatagatagatagagttctcttttgaaataaatcaaaggggtttctattaatagcctagttccttttgcagggagaggaggcattgctgagaattcccaagctaatgttaaatggatatggctatttgcagaagattatttttatgtcccactactgtttgaaatttttgctgttcatggtttctaaaatggaacaggaattgggatgaacttttatatttgtatgtttttatttctacactcttttctgacatagttcttctcgggttctattcaacgaacctgaaataccatggtataccatgaaaactgccatgaacactaggtaatgaaagaatactatcatttcctcttacttaaggtgggaaaaagctatgaaaggaggattgatctctactataaaatgcctgacttttattgtttattcatttcccagctgaaatcttttaactccttaggtgtttttgatatataagattttttactattgggcttatgccatttatataattagtacctttgagaaaatggaaaaccttttaaaataagtattgaactatgtaggttttgcttggtttttgcttttaaggtttaccaatattcttagatcagtaccaactatcctaattaaattaaaggatgatgttattaaaatatagacctactcatcactacagcgctaattttttttttgagtttaagccccttggtgtgcagcattcacttcttagtagtatatcatcagattacctaattgctgctgtgcgaaaagtataatgaaatcaggaaagcctttttaaatgtaagcaccccagcgttagtgaaactgccactctcctcctacccctttctcacatccttccttgtttcagtctgattgagaaggatgaagtaatctttaagtcttcttggatcttgcatgatgttagtggggtaagaagcaagtagagggttcagttggtagggtacttgccagagttctgagcttatctcctggtgcaacataaaattggcatcatggtgcatgccatgtagtcctagctctgggaggtggaagcaggaggattgggaatccctaactacatgtggaaagaaaggaaggggcttggggagtatggtagtgaataacatcattcatcttgagtagatatcccatgttcttataacagcaaattatttaacttcgagtaataagatactaacccctttcacttatttgaaatatttggatatagttacttaagtatcactttatatcattttcagtttttccaggtataattcacacatactctatttttaattttaaaaaaattactagtttgtttacatttatttattttgtgtgtggatacacatgtgccatggacatgacctgtggagatcagagaacttgtagttggttctgcccgtctatccactgggacaaagcacgccacagaagagctatatcagaattttactgacagattcaaggatgactccaccacccccaaatatggaattggagagagaaaccaaacagatagatactattaatcctggttttgtctttacaattcagatatttttgttgtataaatagactgggtagacagaactaacagtaataagctatgttcttaaatatgttcagctctcctaaacttagggatctaagttttgccaatcatagatgtcacagtaacttctgtttcatatatttaataaggtgccttaatctggactagtgaaatagatggctcagtgggtacaagtgtttgccttgtaaacctaaaattttagttctattctcagttgtcttgcctccacatgtgctcctgccttcactcatataacaacaataatacataaaaatttaaatgcctgatggttgtggctcaagggatatgggtgctgctaccaaacttaagaacctgaatttgatctctgggaaacacatacagaaggaggggacatactctctcaagttgtcctctgactggcatataggcacagtggtatatgcacatatacacacatttattaagtggaaaaggaaaaaggaaagctctattttgcatgatgaagtaatccctagggacaatggaatctagctcctcctttacttctatcatttccccttttcctgttagttttttctgcagccataaacacatgtcttaagtttatgctgcacagggtaacttaaatcatttttgagtgttttttttttcttcaacatatagtgaaactagtcacctatgttctctttgcccacctttccaaacaggcaccttcttaggttttgtgtatatgtttatttggtttctttgtacatttgcacagcatatacagatatattactccttttgtgtatgattatatattgtgcagacaataattttaaagatgttctgtacattgtcccctcctcagtaaataaagcattccctgacccagagatatgttcagttaaatatattgctatgctgtgagacaaactgtctttgtgtttgcttttttagagatgtataccattcagctgttatttaaccacttttccattgatagaactcttgctgttaaaacaatacaattgtggctggagaagtggcaggccattaagagcactggctactattccagaggaccttagtttaattcccagaacctacatggtagttcacaacatctgtacctccagtcccagggatctgacaccctctttgagcctccaggagcactgtccatacacagtgcacagacatacattcaggcaaaatactcatacacataaaataaacataaaatctcaaataaataaacaaacaaacagtgctgtaatgagtggccatgtaaataataagatatgctgtatgtgtacctaagagataaattcttagatataggattattgattcgaagagtgaataaataaagagtaaataaagggaagggaaagttgggttgaatatctgaattgaaaaatgttatgttacagttttaatttatatattatgatttattatgattttcatgtcttctgtgtgtgtgtatgtgtgttttgtttggggaaacagaatcatgtagatcagtctagccttttcaaatatttttgtaagctgtgtgaattctttctgttaggctcagagtcttttagatagctctgtgtgtgtgtgtgtgtgtgtgtgtgtgtgtgtgtgtgtgtgtgtgtgtgtgtgtgaaaattataaaagactttttttttgctttgtttcagacataagtagacttcttaatttttttttgaaccccttaatataaattacatagttgactttagacaaaacagggccaaattaggaaaggagcatggaattgattgcatactttcaatctcatatatatacatacatatatacacatatatatgtatgtatatacgtgtatatgtatatatatatgtatatgatttattttcttaccatgtgcatgtctttaatttttttaatataagaaatctcacaaacacacataaatagaagacttgttaactcaccaatgtcttccatggataatcttctatgactgtatttaataatatctaaactaggaacctgacataggtacatacaatccacatgtttccttttctccttttaaacatttgcttttctggccaggaatttgacttaaaattacctgatgaattttcaaaaaaaaaagatattgaaggattagtgaacaaaatttttatagaaagtgctaacggtgagtatcagtctttgcataagtacttacctcagcttttcaaagcttccttgtgaaaaccttttacatctttgttaactctggttactttagaaaataataacacctaaatcttacaatagccttcatgcctgctttctccagataaataatagccataaaaaaaaaatcactgtgatccaggcatgagcgcgcatatttgtaatcccagtatttataagacctagggaagagaatcataagtttgaagtcagtttgggatgcatagtgagaccatattaaaactcctgtcccatttcttactttaggttactactaacggaaatctcaattgaacatttttctgggaatttttaatcattaaagcacattagttttatattagtagaatttatgatcacttgtcagtacaaaatacataaaaatttgaatgcgtaactaatttgcctcagagagagagagagagtgtgtgtgtgtgtgtgtgtgtgtgtgtgtgtgtgtgtgtgtgagagagagagagagagagagagagagagagagagagagaagagcgcctgcgcacttggacacacatgtacacgcatgtgcatgctctccctgttttgttttcctagggataaaccaaggacttcacataggttaaacaagcactgtaatcacttagccattatattttcttcttaagacaggagatgaagatttgcatttgcctagagattagttctgtgtgaattttatttctttggtcctttcaggggaggggaggattaattattcttaaagtattttaggcctctgtgagtttggagaagacagtcttctccagagaagatcacacgactaattacccactaccaaatagccttgaaaacatgcatccaggcaaaactatatggactacaaaggttgtacttagaattatgtttgtgtgtctacatctttgtgtgtaacaacatttttttaaggccaggattaagctgggcgtggaggctcatgcctttaatcccagcactcaagaggcaagagtcaggtagaggacagccagggctaaatagagaaaaccctgtcttgaaaaacaacagtagcagggcgtggtggcacacgcctttaatcccaacactctggaggcagaggcaggtggatttctgagtttgaggccagcctggtctacaaagtgagttccaggacagcctatacagagaaaccctgtctcgaaaaaaacaaacaaactaaaaaaacaaaagaaagaaggaaaggaagaaagaaagaaaaacaacagcaacaacaacaaaaataaaataaaaaagaggccatgaatttgaaagacagcaaagagagagggaaagggagacttcaaagggaagaaaaggaaggaggaaatggtgtaattataatcttaaataatttttaagtatttaaatatatttaaccttcagttttgtaaaactttatgttgattagatttagtcttcaatcagcaacttacagtctcgtaaataactgcatttcttaaaagacaggcaaaatgcttcctgggttttaattaatgttttagtaataatgctattattatatctcttttattgagaaatggtaggaataaagttgataaataacctactgtaagcaagcagcgtatgatttctgaggggtataggacttagctcctgtcatgattgatgaagagtcacttttacctggcttgcagaagcttacggataaagaatcaggattgcctactcaaagtaactgactcttattacagaagatttaattctgtaatttaagaaatgtctttactgtatttgtgtcactatgaatgtgactagacagaaaatttaaaggatctttgagtaaaaacaaggtaacttttctatatttttttatttatagacacatagaattttaatatattaactctgacagacaagaacgttttttagttcctagcaaataagcagactatgctggctgtccaaagatcattgagcacataaataaatgccttttctaagaagttgcctccctaattctgcgagtggaactacttccgggaatgtgctagataagataaataacatgttatgaacactgtttaatctttggatccatgctcagtttcacagctaacatttagtgcttattttaagcattctttaatatacacagctcaagatttatttaagtcactatagataggtgctttctttcatagtctttctcaggaaaaaaagtcgtagattttatttaacattaggtccatgttagtttccttacttagacaatgtggatattgcccaggcttattgataattataggcctgccataaaatgaattgtcataaacttcctctgctttatcattttgttcattagcatttagatagagaaaagacaggagactggagaggttattaaaatacattaactgtcctcattccaggagtgttttaactcagtagctctagggcagatccagatatatccactgctagcaagttctcaggtaatgttgctgcatctagttgaaaggaccctcactttgaaaactagtttatctgaactcaagagaattttcatggcttctcagtataagtcattagtgcttgaaatcaaattactgtcagaatgcatttgagctcttatatgtcaaagcactatgtccacttggagaaatatgtttgcatttttcttttattgtttctgtacttacttcagacaggaaactattccaggccagtctactttattatagattatgcaaaggttacctctcatgtcatttaaaaaatgaaatcaacttggatgactttgtcttcacttgtaaagtccaagtttctttctgccttcttatcttcttggtaaagctacacatacttgatcatgaccaggtgctaaagagtaaggaaaacctaggaagaaaagcagctcgtgggagccagctgtgatgatacagatgagaaggcacactacctaatggagcatggttactttgacttctttctttgacgagatttgtgattagctttattgaaacattaaattcagcgctaggcatgtagctcaaatagttcttatctttcaatatcctatatttttgttcattgactctgttagcacttttaacttgttaataaatgctaatcaggatttttttttcccctaaaagatgttgcccatatttgaaaattaactttgggctttattttacacttctagtttacaataatagcttaaaagcaaggagattctgagcttgtcatttttccctgtatttctggtagtaataatagcacttgatttataaaatggatttaacttcagtttgagtgtgtgtgtgcacgcacgcgcgttgtgtgcgcacacaccacctcataatctaaaacacatggtttattcttacactgcatttattccaacactacatttaggggtacctagtataatgggtagataaaccaaaaatattaccttgaggtgtttagaacttgaaactgttcaaaatatggtggatgtagtaataaaaaaataatcaaggtataaatcaacattagatgaagaaaaattgaagggaaaaatattttgtttcattcatcagtctcattttaaaggaagcagaatctctcgcctcagcaccacagagaacattcacctcatttgaaactacttaaaacttaacagtgttaataccttcattataaatttggccatttaaaatggtggttcccaaaacctaagtttctatcagaatcactcacaggggttattaaattcattaactgtcctcattccaggagtgtcagtctgactcagtagttctagggcagatccaaatgtatccacttctagcaagttcccagatagtgttgatgcagtattaaccagttaatactggttaagattaactttactttgaaaatgaatttgaatccaaagaattttcatggcttcctaatacaagccattagtgtttgaaatcaaattattgtaatctctaattactgtcagaatgcatttgagctcttatgtgtcaaggcactgttcttctctaaagctaattgaacttccctcaagaacttcaatctaataaagtcaactgtagttccattaatatagtaaaatcagttacttttcattgatcattctttgtgccaggaactatgcaaaataatacttaaactcatttaatcttcagagaattaggacataaaatgcctatttgaggtagagaaaaaaaaatctataaactaattttccagaattcagtgagtatattaaggagcaagaatttggtatgatgctgtggtatcttcctgcactgtttaaaatttaaagcatacatattgctggactagaagaggaatagaataatggattatactataggacagtaaaagatatcacaaaaagagatggccctgcactccttaaagaacaagttaaagccacatacattagaactacaggtatctccatccagagaagtttctgcaaagtgaaggaaacacaagaaaacctatgtatcagattataaatattatataagaccagaacacataaaagggataagagaccatctacagcaaaggtcaaagtcatgaagaatttcatatattaaattgttttaaaagtaggattggttgctgcgcgtgatggtgtatgcatttgataaaaacactgggaagccagcgacagataactctcttgagtttgagaccagcctggtcccatagtttcaggtcagccagggttacatagtaagaccctgttaactgccacccccctacccccaataggattggggtttttgtttgtttttgtttactctttctcctataacttttattcactgtaagccagtggttcttaaaacagtcaggcaacaggatcagcattttctgggaacttgttaaaagtgcggtttagagctcagcagtctgtttatactagacttctagagaccggtgtatactagtttgagaaactttaattagtataaattgttgaatatcattaaaatagtaattgtatttgtgattgattagaacacagtgcttaacaaaattgaaatgttgagacctaacagaccacttttctttagcatgacctttttatagcttgtaaatccatttcttccttgctgcatgagatcagagtcaggacaagactctgttaggtcagcattcaaagtgttgcaagctcgttaccattccttagttgtagtaatgacttgaaactttttgactccttttagttaagaagaaaaggaaataataaactcctttttaaaatttttaaactgctaatgtataaaactggttagtaatattttaaagtagtctatttaagccacatgtatcaaaggaataggatgtcttcacaccatgaaatgacttaaagtaaaagtctttcttggtaaaagtaataatacagaaaaggtaaactaggattctcaagcaagtgctagtttaaatacctgtcaccatctttatttgtggtgttttgttttgttttgtttttttacaccaaagccttataggttatatagttggtcagtaatttagttacatgtaatcttatttatatttgcacatatttctccagtgactgaaagcccagcatctaaacactgttggttagtgaatatcccttcaaggtcttaagtatacagtacctgttcatcttagcagcaacaaaaagttaactagtacactctaagtgcattttctatatgttggctgaaagtaccaaagtggccaagtccattgaagcttagggactgaccccattcattttacagatagggaaactgaggtccagagacattaaataaatgagtgagtagcagaccctggcatgatagccaggcctccttggattataatctcagaggtacatggaaaagaatggttctgaacctcaacctggcatatttctaatagtccataccattcaaagaaaagtagtcttcagatattttacatcccaaattcttttcagctatagtatactttgtaagtaatgttttattccaaaattatatttaaagacctcatgttaactcaaagaagtatcagatttcttttacaagactatttcaaaacaaaaagtttaaactaattctgcctttcaaaaatctataaaaatactaacaagtgagtatatgtatagattattgctatgtttactacttaaacaataggaggatataaattatagaaaacaattatttaatcttctgtgtcataaacgctcgggtattttttgaatttggtatctctaatagccagacaactgattattctcaggaaaaacatgcttttcttaggtgattgtctgccagcaagtaacctatagtcaaagtacataggtctaccagaatactgaattccattttaaccagcttatccaaaatcctcttgaattctttttagaagaccttcctacacacttaaaaaaaaatgttaaaatataaacttgatagaaagaagtcatctgaattttaatgtattaagaccatcaaagaaaaaattcctaatgaaaattgggagttttaaaatggcatatgcatgtcatagacaaattgtaaatactgggactataaattatttttagaagatggccatgtaccaagatcctcatgtaaaaaagttaataaattatatttaaagttattacatttggtattgggtaaacacaaatatacattattttaagagttggatggttaaagtgttaaggataatttaatgaaatattctaattttttccagtgcatctgggggcggtgttgtagccattgacaacaaaatagaacaagcaatggtaagtaggctcccagctgtcctttcacggcactgttggtccagagagcagaaacctgaatttctttaagcccaaagttccctcttagtatcaaatttttaaaaatgctaggacacagaaagtttctaacccacacaatactagttgtccgtctgtctgacaatgtcatactttgtgccacacgatggatccggaccataagagggaaagacataattcagtatagtgtgtgctcatctgaaaagcttcagccttttgttcatttaaagtggaggctgtattggcacttaagtctctaaaatacgcctgtgactagtttattatcatatagctttgcattggaatattacttctctgctgtctttattctgcatcttaaaatgctcactctaaactttgggagcactttctatactagctggaaaagagacttttttccaccccatctcccacaggccctgttaagatatcgcagaaacattaaaaaccaagaggagaaaactgcttttaaaaagcaaaatatagaaactatttagtgtttatgaggcacccaaatagtctagaactaagtagttcttaactcttctcaactcttttttgacattcctaattttgttcttcacaggatctggtgaaaagccatttgatgtatgcagtaagagaagaagtggaagttctaaaggagcaaataaaagaattagtggaaagaaactctttacttgaacgagaaaatgcactgttaaaatctctttcaaacaatgatcagttgtcccaactcccagcccaacaggccaatcctggtagcacttctcaacaacaagcaatgatagcacagcctcctcagccaacgcaacctccacagcagccgaatgtctcctcagcataaagctttcttaagcctcgttaaggaaaaactgaaagcaatctttccttgtgtgccactggtgttctttccactttatagaaagcaagtagccatgcttcggctgtgtgcttggccttttcagtattagacaatcgttctacaggagcttccctctcagatgtcatgcagcactgtggctgtcggtccacttgtgtgtcatcagtacacgaggagaatactagatggggtttagtaaagcaaggagagtctgcattctacatgtgcccatgagtgggatctttaaaagttttggtggctctcccatgtttcttaccacccatggatgtaccttgagccttcctgtcacgttataaataacagttcatctaaagagccacttttctttcaatatcaataacatttgcctacataagttttcatttattttgtgttttatttattacagggctgctattttcatattgtacatgaacaatgtcacagaacttttttaattttcttgaataattataagtatcagtaaaggaattgaacgacaggattacatttaaaaaataaaaacgtttaggcaataattgaacaaaagaatcctggcatatttctaacactaatggcaatttaccgttggtatttattttcaaaagatccagcttgaatgtaaattttgtatagttgtaagtatgaaaaacacagtgcacctgtacaggtagtcaccagttattgtgatataataaataattgggctatttttcatgaagaaaactttgttcatttgtttctactttctaatagaaattgccacgattcctctgcttttcaacatttcgtatgatttttttttttttttttgggtgggaataaaaaaagctgtgaaattgttcaacctactttgtaaccaaagaagcaaagctgtgtaatggagttttgttttgttttataatgcacattctttatgtatttttatttagtgttttcttggtcacaattttctttgctgtctagcatgatctgcatggcctgtaatctttgaaccactttcgtacctcatgtttttatccagcactcttattgtactgtgtactagtctgtgaacaatgtcaaataaaaaagaacgaacaggtcgtatggtggagctgagctagtgtacaatgcaccagttgtacagaaacaaaaatgaagtgagccatcttttgttcatttaaaatggtgttttgaatttcatatgcagaaaacgttttgttacattgcagattttaatgtatttaataaatgcaacatgcagattaagtgcagtgtatactgagtatttaaattaaaatgtacatttcataaatacagtttcaagagaaagcatcattttgtgtatactaacacattaagtgtatgtcagaaattgatgtaaaatatatattttaacacattttctgaaattaaactacagttttgttcaaatatttggctctatatgtgttcagaatttgactagatttgtattttcacagttcaaaatattccttaagtgaacacccatgatgttaattacaatgatagttcttaaattttcaaagtaaaataatttaaagaacacaagaatggtgagcaatatttgtactcaatattcatattatgttaacaatataaataggaaatcctcgtctaccaaaacttttacttgaattcagaaaggtgcctgtagaaattaacatgtcctgtatgggtagcccactagctaattaagtcttaatgagaaacagtagttagctttccatgttagaagaggttaaatgttctttatctatttgaaacgttctagcttcaaacagaaggcataaaattgaaacatacatgagattaccaaatattttatattctagttgtgttacaagaaataatgttcaataaacaaaattttcatgttaatagtaatgttagaaatacttaaaagaactaggtaagtatgtagacttgaatatgtaataaccctaaggattcagagtgagattctagtagagccactatgggcaagataggatgtgaaactgctgttggaatataaacctaaagatttcccttcatgcccttcattgctaataatgtggtacttcatacaaagaatgttagaaaagggtttcagaaggagacagttaaatggcagatggctgcccaagaatgcacaagattttgtttgatgcctggcacttaaagtgatttttgtaaaaacaagaaatgagtttttattttagggatataaaaacaagcaaaatataatagtatccaccaaggaaatcgttaatattctaaggttaaaaatgatgacagcaattgctgctactcgtatctttttaaaaggagcaaaactagtaaatggttaataaaaaagattccaaaagaattgacttctgataaactaagaaatgcaaaccactttaatcagttacatcttttaaatagtaggaattaatgtagtatggtgggtttttctccagaatgaaaattggcagtgtaaagctcttaatagctttaaatattaagaagctcttacataagaaacagtattaaagaacatgcaaccgtgtgcctatcctatatattccttccttcctaggatacaaaactttgattgcttaccttgtccctacctaaagttgtgtaatgaagtttccatccaaatctgttccccatttccacgaggcacactgaactccagagtcaggaacagaggtgagccaggtattgggcttttatgtggacatatttgaacaatttcttacagaaattccaataggttaaggatcttcatttagattagttttttgttggggttaaagtcttcaaatacctagactgtcaactagttgaaattccaatttgtgaggtaagtcttatgagaatgtcctctacctttaattttctgtctcaacctatagaccaggtgctaatacataagctttatgttggtttaattttccaatacagtactgcatatacagttgaaaactaactttgcccaaaggaaattatttttaggtagtcctaatataaatttaagatctatccaacaaaacaaaaaaaagcatagggagttggagaattaacatttcgctattttaactgttagatgaagctattaagccttgatgacatgtcctttatgatggatgtgtttcatttctcttcagtgattctgttgaaaggtgaaaggccagtccccaggattcacaattgaattgaggctacacaaaccaaccaatgacaagaaatgcagtaaagggtgtctttctcagggggttcctgaaatggtgacatttaattcttgaaggtcctaagaggaaaggtgtgttctaaacacaaaagcctactcaaagctctgaaagcatacacaggcctaagaagcacagaattttgtgggagggaagctagaaataactgctccatcagtgtttgtagtttggcattattaacaagaatgattcattggatgatagtgggagaatctcaattcagttctttggtagagtggtgggtaaaaactggagacagtttagaaaaatgcaaaagagtggtgagacagcatttccatgggacaaattgaagtttattgaatattctacttccagaatcagtactttgttctccccccccccacctttagaaaaaaaaagcacctcagccaatatttttaagtttagtcagtctcataccaggagccatgcatctctagaaaattaaagtctttgtttcctgtcgaaggaattgcaagaatctgaccgaagagtggggcaaacaggaatttggtcactctaggcctctatcctcagcccagtggtaaacaattgaatcttcctccaggtgactggccaccataattccaaacctttccagcctcttgcttcctgaagagatagtatggattctgactccagtttgcaaatacaccttaagagtaggttttcctttaactttacctttcattttctaacataggtcaggcagctcttcaatactctgctaatacagtaacacacctctcctgccccctgcttccagacccctaataatttgtgtttcaattttctaatactaatatcctctgatgtttgtaccaattggcccaccatttgatcttccagagaacatccctgtctcctatttccataataggttacgaatttctctttctcttttcatgcacgtttttcttatatatgtgaagagttactatacaagagttcccttagtggtctatattggtctgacatgttcaaatggaagaattgctaagtgagtactatagaatgcaaatttaaaagttcacagacctgcactttttcttttctctcttgtttgaatggaatttaaaaatgaacagtctttgagggactggtgatagtaatggcaagataagctcttactttgtgatggcacagtctacttgaaaactaaacttgttcaacatgattagatagtgagttagctctaatgtttccttttcttgccagggaaactgaataattaggcagtttggagtgtttccttactgcctttcagagatccagagtccgtatgtttacagactaggacctgcccacagaagccataatgttcctctgaaagaaggaaggaaaggaaattgctaactttagaaaaaaatggttggagattaagacaagctaaatgacacacttcagctttcccatattaaaagttaaggttacttgtagcgccaattgtttgcatgctttcattatttccataaaataaccacaaagtgctcttgcccactgcaattcaaaatgtcttccagatgatagtttctgtcatcttgcaattagtatattgatagataaacccaaagaagactgcagacaaggaaacctctcccacacttggcgtatataataaatactaggccagtgtctaattctagctcactgaaaaaatatgtaaatcccttaataaggcagtagtcttcacagataaatatgttgatgtttggggaaatatttgggctttatttgtatttttatttcctagaaatgttgaaaagcagtttgattctatcttaacttaggtgcttaaccctatactgaatgtttgaggagcgaaagctgtttaggacatgatctttgccccctctccaaccccaggatctcagcatccaatgtgaaagtagaaggtgaagtaccatgttgcttatccacaataagtacagtttatagaccttgctcgttcggtagaggaaggttctctaagtaataatttgctgtgttatgtgaaatcctttgccattgccaggaaataacttaaatcgtcagaaagcttttgcatcaaataatccttctggaaagaggagaccagacaaaagacttcacacctgtactgagcctgggaggtcacccccaaaagaactaatctcagagagaagtttatacatttttaatactctcagtttgcagataattgatctaatttaacctaatttgactagaatttccatgtcatgaattatattgtctcgtctcataagcaacatgcattttggctgtcctaatcagctatttaatgaatgaagttaataactcaggtacctgatgccaaaaatgaatctccagtaggactgagaactctgagataaatacaaggctgtatgctaggtaagtggtaagccttaccgttcagatcagtggagaaggaatggatggctaagtcaacaggcaatattgagactgtgtaccctttgaagaaagtaaagttagctctcacaaaaattaaaatttccagctacactagaagtgagtcttctactttgtgaaattcaaaacattgataatgcatgaaagtgcatagttttacaaataaattgtgaagagatgctcagcctcagcaaagcaaagtgcacatgaaacacgctatctcagatccagttggtgaacattagacacaaggattaagagctgacaaatatgaaaaaacagaaatctgatgtcgtaaagtttgcatagccacttctaaacgcagctggttaatgtccagtaaaattgaaattttaggtgccctgtgacccaatggacccactttttagtatctccctaaagaaacacatattcacaaggcagcttctaatataaaattggaaaaatacaaatctaacaagataatggaatatgctagatgctataaaatggtaggtgtcagtgaaaaagaatgaagaaggactgtatgctgacagtagacctctaggatgcaatgttaaatttgttaaaagtttggggggaaatacatgtaatacacatgatacatgtttaaaaaaacatgccatacacaatactgtatagtgtacttctgcaaataactatgtgtgtacaatataaatagagagtttggaaggatactaacccagctgtttacagtagtctggcggtgtgtgttagcttaaagtgtaatatttgatgtctgtgaatttgcactcatgtactgtttctgtagtaacattaataaattagaaataaaatgaaatagaaagtgttttcttcttgtctactgctaatatctccttcagcctccccacttgactactgtcccaggagtgttttccatcctccccctgccccccccccaacttcttgtatatcacccctctcctctggattatccatgtaagtatataataaataataaaatgtaacactcttcccctaacaaagtcttgtgtccttcccccacccccccgccactctgcccttccagctttctcctttgctttccctgctctcctgggctgtcacagtggtgccaactggccttggtccacagagccactagagctgttcttgtcaatgccaccaatgctcctttgatgctaatcaaccacagtgttcttattggagtgctatgcctaatttttcaccatcatttcattgagatgagatgtcattttccatttcttcactttcagttttcctcactgtccttagtgtctctctcttttttttttttaattttttattaggtattttcctcatttacatttccaatgctatcccaaaagtcccccatacccacccacccactccccctttttggccctgacgttcccctgtactggggcatataaaagtttgcaagtccaatgggcttctctttccagtgatggccgactaggccatcttttgatacatatgcagctagagacaagagctccggggtactgcttagttcatattattgttccacctatagggttgcagttccctttagctccttgggtactttctctagctcctccattgggggccctgtgatccatccaatagctgactgtgagcatccacttctgtgtttgctaggccccggcatagtctcacaagagacagctatatctgggtcctttaagcaaaatcttgctagtgtatgcaatggtgtcagcgtttggaagctgattatgggatggatccatggatatggcagtctctagatggtccatcctttcgtcacagctccttgttcgtaactcaatctgccttttaacaagtgagttaatccattaccatgtatcatcattgctggcatgtctagactatttctgccatgtaattttgtgctttctctttaaaatactttctgggaacgtcctcattttcccctcttttggcttattcaactgatactgtttttcacttcttacccttttattgttggaaagttatacatcccatgtccactcacactaatgtttattttaccatcatctttgtcactaagttgtggtgatccccaatcatatgcaaaaaaaaaaaaaaagtagtctagtaaatgcccatatgttcacaacccaatttaaactatctgctcatggccaatcttacattactaacgtttctactgtctactcccgtgatcttccagattattttgaagagaacctgagatgtcctagacttcacattcacaaacatattttttttgtaagcaaaccattgcaccacctcaaaatgagcaatccatttgtctcacaggaaatctagtcagcgttcactgacagtcacatctcccttctgtcatgtttatagtttctttgaatctggaccaaaggaaggactgatgtgatggcacattttaaatggttgtcataccttgaaatctcttcacctaaagggtccatgtgtgtgtgtgtctctctctccctaccccttaaaatactctagtaatctgtgctatttttcctgtggctattcctggagcttgtgtttccctggttgcatttttgtagagttctctatttctaaatcagatcttgaagcttcaactttatatatcgtcagaattgattcaaagaccacatttgctgaatgcttctgtctgattgcctctactcttgtgatattaccatcactgatcattattccatgtgcctatgcattctgttacactttctctcactctccaaggacactcctctaaagagaaactgccttgctcttacctagtcatctaagaaaggtgggggctttatttcttccttttacttccagtttcaaactggaagtatttcaaaatacattgagttctaaaaatgaacaaaaataaatatgtaaggaactaatatcttgttctatgggaaaatgaagtgagttcatttgggataccaaacctctggtgctttgtagggagagccaggaaggaaggaaagaaaagacaaaagttggtgattgaaaacaactggtctctactgctcagtcacagagtgacttctgtgtcaagaacattttgaaacaggaggattgccatgagttgaaggctaacccagattacagaatcagactctcaaaaagaaaaaaaatatatatattgagggctagggatatatggtggtttgaatgagatgtccaccgtaacctctggcatttggagtatttggtccccagtgggtgacactattttgggaggtttaggaaatatggccttgctggaggaagtaaatcactaagggcagactttgagtttcaaaagtcttggatcattcccagttggggctatcttagcttgttacttgtggctctgagatgtgagctttccactattcctgccatgatgcctacctggtgccagatttacctgctgtcatggtgatgggctctcatccctctggaaccctaatcccaaaatcaacccagttttccatcaataagttgccttggactgatgttttatgaccgtaatagagaagtgactaagacaggatgggaagcccatatccaggcacaactgacgctactttgagagtaacagtagcatctagaaacagcagtagaagctgttcaagaacccagggagtcattacacagacaaggagtccactcgtacatgctcaacctctaccatgtggttactgaacatacttccatataagcccatgagccagaatgcttactaagagatatggcagtgggtgagtggacttcagcatgtacaaactatgtctaatagtttgctcagcaagactggtacccatggagtctgctgtattagttcaacatgcctccacaaagaccaatttatcatccttttggactttctccagacacaggaaagtgactcaggacaaggacttagtgttgaagcattagcttaataatcttgtgcaagattgtgcaagagcctaggtctgtgtggtcctcctctcatccaccaatcttagtcgtcacaggtttcctttttctcaactctcccatcctgcccctaatagccagctgttgcaaagacaatcactgagaaaagctgtaaagaagtccctttatagaatgaaaatgggccccttaaagactgccctgtcctattctctagagagagggaataagtggggttctgagcctgtgagtcttggctttttcactaccgacttaacttccggaatctaccgagttcagcgttcagtaatggctctgaagctagctgactcatccagaaacacagcttcctggaagcattctcttctcagataatcacaccctcaaacgagcttctaccccttgggtcctgaccgccagcctggggttggagaggcacaggaacaggagacgacatcatgtctgcgacagaaatttaaaatgaacagcttagactctgggcaggagagcatcaatacttaaagacagaagctgagcagtatgatgttaaatgaaaagtcccctttgccctttgatagccctctgtacccactggcctcagtgctgcagtctctgagagggaccctgctttcatatttacagttgtatgttctggcactaattactcagattactgaaggagtaaatgaagatccacatgaatcttatactttttttttattaatcattaagtattggggtaataacttactcataggcttcttgtaggacatgactccttgtgctggcttctgctttttttgttttaccactttctgggcacctggttaaagccatggtctttttctttatcaatttttgaccagagcctctggagaaagactgggaaatttacaacccttttgacaaaaaatttcctccttacccttttagaacagcacaactacccaatggctagcgacagcaagaatttgcttatttgacaagtatggagacatgtttaggagtttgtaatctgcccaagatctcagaattgaccagaggtacagctatagtgtaagagacctggtattccatgtttctcccactgtgcttccatgggctcaggatcaaagggacgaaagcatattttctggaacaaacatgttgaagatgtgtacctggcttgttcaggtcatgacatctataaaccttgggctctgtgtttaacagctggccattcaggatgaacagaataccgataacacataacaacacaccctcccctcaagcagctttcatgcagctctctgagatcagtgtgattgctcctctgtcaggaatgtggattgtcaagccaagtgtggtagctcacacctataatctcagcatttgggatgctgagaagggattacaggttgaggccaggctggtctatctagtaaatctatgccagcctggactacaaaatgagacccaaaaaaggaaaagactattaaaatattttttaacaagtagtgcatactcccccccccccttttttttaaatgacagtttcacttcgtgtaaaggttgtaagggactcatcagtacaccaaacaacacaggacaggctcagccctaccagtcagcgatttgggttagaataaatgttgtcatctacacagtgcttgtgaattgccctattgcaaggctggtagctgcttcatctaagttacaaagaacagtttactccttttttatacacagcatcagacttgacctttaagaaaaatataaagggacaattttacttaatatttcttcctccaagggattgtgtacagttctatactagatctaagaaagaaaattgggtcatgctgctaagctaaaagaaaagtagacaaaatatactcattaaattgataggaactcttagacagaaagataacatctttggataagaccaaggcgatgcaaaa

SEQ ID NO: 424 - DNA, 3807 bp, Mus musculus
atgtccaagatgccggccaagaagaagagctgcttccagatcaccagtgtcaccacggctcaggtggccaccagcatcaccgaggacaccgagagcctggacgacccggacgagtcgcgcacggaggacgtgtcctccgagatcttcgacgtttcccgggccacggattacggcccggaggaggtgtgcgagcgtagctcctcggaagagacgctcaacaatgtcggggatgcggaaactcccgggaccgtgtccccgaacctcatcctggatgggcagctggcagccgcttcagctgcgcccgccaacggaggcggcggtggcgtgtcggcccggagcgtggcgggggcactcgcccagaccctggcggcggccgccgcttcggtgtccactcctgggccgagtagtgcaactccatctcagccccctgccacttgtagttcgcgtttccgcgtgatcaaactagaccacgggagcggggagccgtaccggcgcggccgatggacgtgtatggaatactacgagcgggattcggatagcagcgtcctcaccaggtccggggattgcattagacacagcaatactttggagcagactgcggagcgggacagcggcctgggagccaccggagggtcggtggtggtggtggtggcctccatgcagggggcgcacgggctggactcgggaactgacagctccttgactgctgtgtcacagctacccccgtcggagaaaatgagccagcccactctcgcccagccgcagagtttcagcgtcgggcagccgcagcctccaccgcccgtaggtggggctgtggctccaagttcggcgtcgctgccgccgttcccgggagcggcgaccgggccgcagccaatgacagcagccgttcagccaacccagctccagggagccgtggccggaggcgccctccccgggcctgtcggtcaggggctgccgccgccgccgaatgtcaacctggcgcagcctgtggccctggcagctcagcccggcccggccggcggctcctcgttgtcacagcagttcgcctatccccagcctcagataccacccgggcatttgttgccgatgcagccatccggccagagtgagtacctgccgccgcacgtggccctgcagccgccaagccctgcgcagcccttgtctaccagcgctagcgccacctctgcttccgcggccagctttcctctggggtctggccagagcgtctcctccttgggtgcccagatgatgggcgcctccgcccagcccagtgaagctgtggccccgggtccggttcctgtaggccaggccgctccttgtcagccggccggagtggccccagctgctctaggaggcgtggtgcagccaggctccgggcttactggggttgggcagccccagcccgtgcagcctccgcagcagatgggtggcagtggtcagctgccagccgtgcctggtggtcctcacaccgtggtgcccggagttccaaacgtgcctgcagcggtacccgttccaagcgtgcctagtgtgcccaccacttctgttactatgccaaatgtacccgcgcctctgggccagtctcagcagctgagcagccatacgccagtcagccggagcagcagcgtcatccagcaagttggttcacccttagctcaaggcacacacagtgcaccaacaagtctaccacagtctgacctaagccagtttcagactcagacccagcctttagtcgggcaagttgacgatactagaagaaaatcagaacccctacctcaagcaccactttctctcattgctgaaagtaagcctgttgtgaagcctccagttgcagatgccctgacaaaccctcttcagttaacacctatgaacagtctggccacctctgtattcagcatagctattcctgttgatggtgatgaagacagtgcatctgggggcggtgttgtagccattgacaacaaaatagaacaagcaatggatctggtgaaaagccatttgatgtatgcagtaagagaagaagtggaagttctaaaggagcaaataaaagaattagtggaaagaaactctttacttgaacgagaaaatgcactgttaaaatctctttcaaacaatgatcagttgtcccaactcccagcccaacaggccaatcctggtagcacttctcaacaacaagcaatgatagcacagcctcctcagccaacgcaacctccacagcagccgaatgtctcctcagcataaagctttcttaagcctcgttaaggaaaaactgaaagcaatctttccttgtgtgccactggtgttctttccactttatagaaagcaagtagccatgcttcggctgtgtgcttggccttttcagtattagacaatcgttctacaggagcttccctctcagatgtcatgcagcactgtggctgtcggtccacttgtgtgtcatcagtacacgaggagaatactagatggggtttagtaaagcaaggagagtctgcattctacatgtgcccatgagtgggatctttaaaagttttggtggctctcccatgtttcttaccacccatggatgtaccttgagccttcctgtcacgttataaataacagttcatctaaagagccacttttctttcaatatcaataacatttgcctacataagttttcatttattttgtgttttatttattacagggctgctattttcatattgtacatgaacaatgtcacagaacttttttaattttcttgaataattataagtatcagtaaaggaattgaacgacaggattacatttaaaaaataaaaacgtttaggcaataattgaacaaaagaatcctggcatatttctaacactaatggcaatttaccgttggtatttattttcaaaagatccagcttgaatgtaaattttgtatagttgtaagtatgaaaaacacagtgcacctgtacaggtagtcaccagttattgtgatataataaataattgggctatttttcatgaagaaaactttgttcatttgtttctactttctaatagaaattgccacgattcctctgcttttcaacatttcgtatgatttttttttttttttttgggtgggaataaaaaaagctgtgaaattgttcaacctactttgtaaccaaagaagcaaagctgtgtaatggagttttgttttgttttataatgcacattctttatgtatttttatttagtgttttcttggtcacaattttctttgctgtctagcatgatctgcatggcctgtaatctttgaaccactttcgtacctcatgtttttatccagcactcttattgtactgtgtactagtctgtgaacaatgtcaaataaaaaagaacgaacaggtcgtatggtggagctgagctagtgtacaatgcaccagttgtacagaaacaaaaatgaagtgagccatcttttgttcatttaaaatggtgttttgaatttcatatgcagaaaacgttttgttacattgcagattttaatgtatttaataaatgcaacatgcagattaagtgcagtgtatactgagtatttaaattaaaatgtacatttcataaatacagtttcaagagaaagcatcattttgtgtatactaacacattaagtgtatgtcagaaattgatgtaaaatatatattttaacacattttctgaaattaaactacagttttgttcaaatatttggctctatatgtgttcagaatttgactagatttgtattttcacagttcaaaatattccttaagtgaacacccatgatgttaattacaatgatagttcttaaattttcaaagt

SEQ ID NO: 425 - protein, 739 aa, Mus musculus
MSKMPAKKKSCFQITSVTTAQVATSITEDTESLDDPDESRTEDVSSEIFDVSRATDYGPEEVCERSSSEETLNNVGDAETPGTVSPNLILDGQLAAASAAPANGGGGGVSARSVAGAQTLAAAAASVSTPGPSSATPSQPPATCSSRFRVIKLDHGSGEPYRRGRWTCMEYYERDSDSSVLTRSGDCIRHSNTLEQTAERDSGLGATGGSVVVVVASMQGAHGLDSGTDSSLTAVSQLPPSEKMSQPTLAQPQSFSVGQPQPPPPVGGAVAPSSASLPPFPGAATGPQPMTAAVQPTQLQGAVAGGALPGPVGQGLPPPPNVNLAQPVAAQPGPAGGSSLSQQFAYPQPQIPPGHLLPMQPSGQSEYLPPHVQPPSPAQPLSTSASATSASAASFPLGSGQSVSSLGAQMMGASAQPSEAVAPGPVPVGQAAPCQPAGVAPAALGGVVQPGSGLTGVGQPQPVQPPQQMGGSGQLPAVPGGPHTVVPGVPNVPAAVPVPSVPSVPTTSVTMPNVPAPLGQSQQLSSHTPVSRSSSVIQQVGSPLAQGTHSAPTSLPQSDLSQFQTQTQPLVGQVDDTRRKSEPLPQAPLSLIAESKPVVKPPVADALTNPLQLTPMNSLATSVFSIAIPVDGDEDSASGGGVVAIDNKIEQAMDLVKSHLMYAVREEVEVLKEQIKELVERNSLLERENALLKSLSNNDQLSQLPAQQANPGSTSQQQAMIAQPPQPTQPPQQPNVSSA

SEQ ID NO: 426 - DNA, 71997 bp, Homo sapiens
  misc_feature (1)...(71997): n = A,T,C or G
cactccagcctgggcaacaagagcgaaactccatctcaaaaacaataaaaaaaagacatgttccaaaagtatctgtcattgcagggaatttcccactttaccaatgttccatgtttttcagcatgtttattactttactttcataaatattgaataaaattgttgtagcatgttgtaaaaatggaacatttatttacataatatttacttagaatccagtatgtgccaggctgtattattcactctgagaatataagaatgaacaagacagatgaaaaccctctccctcttggaataatccacttcagtatgggaagagagacaacaaacaaaataagtaaataatgtagtatattagaaggttataagtgtgctagagaaaaatcaagcaaaaagagggatgggaggtggaggcttgctgttttaaatagtgtagtcagggaagtcctcactgaaaaggtgacatttgggccaagacctgaagataagggaattagccatgcaaacagcttagggaataaggagaaactatagtaagtgcaaaagtcctgaggcaggagggtacattggtaggctataagaatagcaaggagatcattgtggctggagtagggtgagcacagcacaaatcttgtaggttattgttaagacttgactcttattctgagtatgacaggaaacaatgaatttgagcaaagttgtaggaatcagaaaaatagaaatgacttggatgtattcaccttgtcctagcaggaaactgaaggcacagttccaaggagattttgagtacaaactaatgtaaagaacaattacagaaatgtgggcagagttaagaggccaaacaaggaatgctgaggcattcaggggctagtacattgggatgccatcaccacagctggatctgaagcagcccaatgaaagttagagccatgggcgggtatctgacagggtacgcagttgtagaggaatgccatcaccaccagaatctcaggctagctcaaagggagggggaaagaaataacccaaattcttttttctactaccctctgacctcctgccagcagttctcattggctaaacccagggaagacaaggggatccctggtaatgagagccagaacatcccattcctggaatgcaagagtgcagagaagagcagggaaatgatagagaagaggaaatcaggcaataaccagcacacttgagtgttaccaaagctgaagcaaagacatcttctggacccatttatatattgactgctgcacgtaaaaccaagaatccaaatttgtttggggaatttagattcataaagtcttggcactgaaaatagtcatctgttcagtcaactcttattttacagttaaagaaactgaggcccatcgaaattatgacctgttcagggacacacaactagacacaatgctgcagagactgtaacagaacaaaagttcctgacgtcccactctctttcaactttgcttctaatattttaattatttttctgtcctttctgtccttgtaattctgttctaaaatcctcttgtatttcataaattgactcttaaaagttgctctgcattagtttgattcaactgaaaaggcaccaattatttctaatattatctttgagggcattcaaatatatactattcccaagggacaatttatctttggatagcatttatgaactatcatctatcacaacagctaaaactataatcttggctgttgttaatacacccttacaaagttatttttggcttagtctggagtctgtgggtacattttttaaatatataaaagtaatatatttaaataaaaatgatttgtgatcattgcagaaattttgaaaaaaatatataaagcaaaaaaaaaagcctattacctcatcccttagagatagccattattaaagttccaatgtatttctcccaaattcttttactatgcatacatgtaatttttaaaaggcatgatataattttaattttttttacttgatattctaacatatttaacatttttaaaaattttcaacaaatgacaaatgttcatcttcaaaatgattttgacttttgaaaacagaagtcaactagaaggtcaggagtttgagaccagactagccgaaatggtgaaaccctgtctctactaaaaatacaaaaaattagtcaggtatggtggcatgtgcctgtaatcccagctactcgggaggctgaggcaagagaatcccttgaacccagaaggcagaggttgcagtgagctgagatcgcgccactgcactccggcctgggagacagagcaaaactctgtcaccaaaataaataaataaataaataaataaaataagtcaactagaagcaaagttcattaataaggtgggctataaagtttgggtaatatttttctacccataacaaggtgctattttaaagcaatatgatcaggattcgtaagctttataattaagttgtaaaataatctaagttttaggatgatatttaacaaaaatgcaacacgagcacatgtgtaccccttttaaagaatttacgcaataactttggcatgctatccttttttttttattgagatggagtttctctcttgttgcccaggctggagtgcaatggcacaatcttgtctcactgcaacctctgcctcccaagttcaagcgattcttctgcctcagcctgccatgtacctgagattacaggtgcccgccaccatgcccagctaagttttggtatttttagcagagacagggtttcaccatgttggccaggctggtctcgaactcctgacctcaggtgatccgcctacctcagcctcccaaagtgctgggattacaggcatgagccaccgcatctggccttctttttttagtcttaagtttttatcatatcttataaaatgccaaatgccatcaaatagtaatatatttcaaaagtattggataagataagcaaactttcttctttttgcttggaatttatatcacctattcacatttacattggagcctatggtataaaacatctaggtgtttcttctcccatgttcaactaggaaaacagattacctttgcgtgctctagagaaagtaatggcctatggtggccttcctttagattttaactgagtaggaacaaatttaacctttgtacatacaggcctgagttgagagaagataaaggcagatacgaagaaagtgcccaggccagttgtccccacaggtgctcaagagtgtaaccttgctaataaagaaatagcccgtgaaacagagtagaaatcatctactgttcaattgtactggataaggaaaacaaagtagtttctaaatgaaaagcaatccaccaatatcaaaatgcatggcctttccacctacctcttccagaagaggtcccctcctctgagacccttttatgactacttgaattatttaaagtgtccctagatttgcctatggatatttttatccactgaagaaaaggagtctcagccctgagcatccctaaaattagctctatttttgtcacacttatttaataattacatttaaacaaaaagacttttttttcactgttgtccagagttgttttttttttaagtggggcatttcaagcttctcttaaatatcaaaatcactgcccttaaattaaagttaaggtttcatggagaaaaagatttctctcttacaaagatttagtcattttgcaacaaagttattaagtctctgtaagaaatgccatatagattgttaaatatttcttccattttgatatcacacaaatagtacagccctacaaaaagaaacttgtctttgatcatataagttatttttaaatctctctaaacataatacacaatatattataaactattagaggttaagattttttaaaaaggtttccttgtaaatgtaaatcagatcatgttaatcctctgcttataacctgcctgtggcttctcaatgcatttaaaataaaatatctgtgcctttacgtggccaacaatgtccatatgatctagcccttgcctactactcagatgccccctgctcccttccaaccacatactggtttccagcacaaagccattgcctcatctgtctcccttaatcaaatgctcccctgatgagcttgtccttagctcaaagaacatttcctcaggcctacctacagtacatctgagtaaggtacactgtctcctttcccaccttgcattattgtttcatttttttcttaacacttatgaatatttgaaattatatttttttgcttatttctttggtggttgtttcccctactaaaatataagacctatttgaacaaggactttgcttttcttttctggttcacaactattttccccaagtccaacaaagaggtcaacacagtaggtttcttacagagtcttgttctgtcacccagactggagtgcagtggtgtgatcttggctcactgcaatctctgcctcccaggttcaagtgattttcgtgcctcagtcccccaagtagctgagattacaggcgcctgccaacatgcccagctaatttttgtatttttagtagagacagggtttcaccatgttgaccagggtggtttcaaactcctgacctcaagtgatctgcccacctcggcctcccaaagtgctgggattacaggtgtgagccactgtgcccagccaggtttctaaatacatgttgaatgcatgaagtagagcttgtattattatatttggagctgtttgttcaagatacaagcttgatgttactatgataaatctttttattccacagaaataaaatatctcaaatgaaatattagtacaaaaattattttgaacacagtagttattcttaaagaaattcagtggtgaatacttactatgattgaatcatcacaatgtaatttatctttcttgaatatatgtgtttttgtgggacgggctgatgttttttttccttgaagggtagagccattgtattgatgaaataccaatgaaataaacaaaaatgaaatgtggataagctaaaaatctaaaattagattagttgttgagtaaatatatacaatatgcaaagaaaaaagattagtatcaaaatccagaaacaatggggaaggatagaaattctaaatatctgaagatgaaaatatatttacatctagtcaatttagtttaacaataggtaaatgccacaaaatgggtctcaaaacaatactgttaccattattcactagggggttgatggccaaaattaaaacaaccctctgggtaacttttcaccttgattttgcatttccctatgtctttagtttggtcacttccttttccttcaaagatcccacattaaggatgagggaagggagtgaatattaatttgcagagaagcagctcattacatgatcattttaagcaacacccaaatccttatgtaaacatggatcatgtgttgagcttttaatgagtatgaatgctttcaaggtaggatttcaagtattataaagttaaatgctaaaagtgttttgtttccagtgactaaagagcttgttattttgcaattaaaacgtaactgcgaatgcaaggtagtcaagattctatctgtacctttcaaaactttggcttctatgaataaaagtagttcaatcagccaggtgagaatgaccttcagattatcagtccggagcatttaggctatccttcatgtgtgaatacagtttatataagtttctacactcacattttttaaaattttataagctgatagtagtaacatacagaaggaattataacctccaagtctagaaatttgcagtctttcaatgttcttttgtgagtgttagagttttacagtttaaaattacaggtatgctacaactttaatcaatacttcaaattcatatacaagaaagactagacagtgatgattcactttgtcaaagaatgtgccattgaatgtctgtaaatagctcatctatgacagaatatggcttctccataaaatcatggatgtctagtaactgctttcttcttcttttttcaattaacaaatggtattgccaatagtatcacattgagttgctatcttttcttctgaagatgccaaagctgccacatctgtgacctttttccatactttttcagtggatttggtagtttaacacctctttaccacaatgttatttctttttagtgataggggaactgagggagtaatagacttgtcagcaatcacaaaacgagattatagcaaaactggagcttactcttgatctgtccaactaggaaatgtagtttaaaaaaaacttcatcctgactggccacatataatatttaaaaagaaaaataaagaagtaatatagtcattaatggattttgtttggattttctgttgccctacattgcagaatttaaacaagcttgtaaaaccgcagagctaatatcttacattctaagttaaattccataaaatataatacaggtcttaataggacattatgtttatttcagttcgaaatgcaccctttacttttaccaaattgctacattttgcttgaacatcaaaggtctttggaagtcaaggaaatcttcattaaaaaaaaaaaaaagacaacattgtttcatagtatattaaactcaaaaagagtatttaatagaagtttccttaaaaacacctcattatcaagtaagcatttgtgcatctcagtcaaattatacttttctttataatagtatttatggaattttattagccttagttctttctcattacatttttttttcctttttgggcaataccacacaatggtctcactgaaagggtttattaatatgatattgttccagaaatggaaccctacgaaaatcatagtaataaatcaagtactacttatttagacaactgatatttatttccagcaaatgctttgtggaacctgaaaactattctccattttgtatttttctattaggttggtgcaaannnnnnnnnnnnnnnnnnnncaatttggtaataaaaaacacagaaaataagcataaactatttctaaactccagaaaaaattgttgactgggatataggtagtccaattcttaatacacaacacagggaatgttcaataaatgtcactgtctaactgatagtattaatgctaaagggttacttctctttgcctaggccattgcttaatttctatggaaagtattttctttatcccataatgtttaatgcatcattattattttaaatataatataccttcattgaaaaaaaagaggttttcttgagtatctagagtttacattccaggattttctatgaaataattcaccatctggtactgatgaggttagataataacttaggaaaatttgggggtatgatgtttacagatgatgaaaagatgttgctgtagcagttttttattttcatcagtagaaactgtccttagtttttaactgcttttattcccctgcattatgttttctaaatgtatctcccatgcatcactgcaatttgaaatatttgaaaaaagtaccaggtacagaagaaacagtcaagttgggggctctaagagcagtaatcgaggattcccacagcctctagtatggtctctgggtacaggcatgcagcctggtaactgcattaagactcctagtcttgaggtttgggactccaaggatctctttattccagtgagttaggctaccatcttacttactaaccactctctatacagggagcatatgtacttgcatatacatactgctttctatcatttaaattagttattgaaaggctttcaattctttgtggaccaacttttgaattacatacttttttgtttagatatagctatgccactttttgtcctctacattgatttccaacttacttgcaaaaatcagaattcttatttctttgtagcagtttgatgtaataaattctgtacattttttaagggcaaatgtataaaagtagctagggcttttaaacttttggaaaacaatattttcaagagaactattaaacacaaatccttaaccatctaaatgacacttttaaaagttataaatcatatgcttttcctaagatgtcttttaacatctttagccccctccttaccagaaatttagtccacttctggatctcttctaaattatctttatctttcctttcatctcataatatatcattttaaggagaaatggtcttacagattactttaagatttttcctctaaatgtacgatttaagagtatcataacgagtaatcaagaagtttatatgataagataatgtaaagggatgagcaggcatataatactcatttttccaaaagcaccaccatcaacactacccattataaccaccttaaacatctggtaaatcaatccaaaattaaattaagcttttataaattcatattgggtttaaccatttgatctaacttattgatggaaaactgcctctaacaattactgaaattacagacttagaaatgaaacattccattagctatctctgccacaatagcataacgttacattttgttccattactttcgcccagccccttaagaaatagggattttatgtcgtcttatttcacattctgactccagtcacttgggtttggagggcatggtttccactaaagttaaaagacctagctctataaattacaactaaagacctaaaaaattctctgcaaatttaattctcaaaacatcttttgggataaaaagtatttctattcttcaaagattagagaaccgagttcaacgatttactgatttaagttatcattatgtgattgctaacgctgcagtagatatgaaatcacgatttccattaagacttagattttacctaaatgacgactgctttagtatgtcaaagtttaggagcccatccccatttttttaaactgcttaaaagaatggccttagcatgccaaagtttaagagcccatccccatttttttttaactgcttaaaagaatggccttaccattttctttggccaggaactaactacaagatgataaatttgccagtactttcttttcatagttgttctttgcattggaacaggaaagggtgctttatcactcgttacggttgttcatggcccaatccaaatcatataatacgctggctgctactaacagttttagaataaacaaaaagaagaactataatgcagtaggttctacatttataaagcccatgagctgatttcgtgccgaaagtaaaacagtctcaagagtttaaatgaatcctggaatcacagcaaattcaggaaatttaggaatatgttggtaacccttaagctttttaaaaactgactacaccctgggcaagtaaccaccccctgatgccgttgtgggagacagaatttctggcaggaagataattttctgactcaatctggcttgccgttcttgtttaatcatccccatttctctgaacattttactcctctgactacaatggtcaacatttattttcagaagttttaaagtgatttagttcttccagccgcacctctttttatcccatctaagtcttccccagcccccattcctatcgccctcgtttcactaagattttgctaaacattagacacaagcacatgacctccagtcttccactgtctcggaacaaaccgacataaaaacatctgattagttccattgtaagcttccctaggcttagaatttaaaatggtctttagctcgtcaatgcttaaagaacctacaacacaaaatttaaattttaaaaattttaaataaagaaaccgctcccttttttaacctttagccccgcccattgccccccaccccaggttccacgcgaaactgcaggaaaccggagggggcggagcggtgacgtcacgacgccggtgcgtcacggaacggcggcggctgcggcgctggcggtggctgcggcagcggcggcattttagtcggcagcggcggcggcagcggggctgctgctcctcccagcatccctggcgcggccatttcagccccatcttggcccagcggagggagctgcagccgccgcttcagcagtttgaatttcagtttcttcggggtttaggaattgggcgcaccgaggaggagccggagaagccaccaccgctacctcacacagccggggcgcctccggtcccgtgccagcggtctgccgccgccgcccctctctgagagaagccgcgaggggaggccgagaccgccgtcgccgcccgcccgcaggggtggttccccctgtaaggggaggaccgagccggctttcccctcccccagagcgggtttccgcctgaggcagtcgacatgtccctggggctgagctccggctagagccggggagggagggccgcctgcccgcgccacagccccaccgcccgcccgcggaccttcagccagctccggcccgcggctcccggctgaattaggcatctccgactccggactcgccgctccttccctcagtcagagagcccagcgctgacgccggcaccggcctgaggagcccgagcggggcagcaccgcccctcacgccgccgccaccgcctcctcctcctcctcttcgccctcccactcccacccccagccaaggcctgctgaccgcgccgagcgccgagctggactgaccacggctgcccggagacgagagaggaagcagccggcccgcccctgggttcgcgctctcgccgcctctgagggaattgaattgaggcgccgcggctgcgagagctaaaaaggaaggaggagccgccgcgggactgagacgggggcagagccgaagagaccgacacagagaaggaaacgaggaggaggatgtctcaccgggcggccagcgcctggatcagcccgtgactcttaacagcggcgggcctcagaccccagcgcagactcggactttgtctttgggggcccgtgctctgccctccccggtttccgacaggacccagaggagccggcgtgcctctctgccctccagccttcttcaccatgtccaagatgccggccaagaagaagagctgcttccagatcaccagtgtcaccacggcccaggtggccactagcatcaccgaggacaccgagagcttggacgacccggacgagtcacgcacagaggacgtctcctccgagattttcgacgtctctcgggccacggattatggccctgaggaggtctgcgagcgcagctcttccgaagagacgcttaacaatgttggggatgcggagactcccgggacccgtctccccaaacctcctcctagatgggcagctggcagcggcggctgctgctcccgccaacggaggaggagtcgtttcggcccggagcgtgtctggggcgctcgccagtaccctggcggcggctgccacttcggcccccgcccccggagcacccggcggcccccagctcgcgggctcatccgccgggccagtgactgcagccccatctcagcctcccaccacatgtagttcccgttttcgcgtgatcaagctggaccacgggagcggagagccctatagacgcggccgatggacgtgtatggaatactatgagagggattcagacagcagcgtcctgactagatccggggattgcattagacacagcagtacttttgaccagactgcggagcgggacagcggcctgggcgccaccggagggtcggtggtggtagtagtggcctccatgcagggggcgcacgggcccgagtcgggaactgacagctccttgactgctgtgtcacagctacccccgtcggagaaaatgagccagcccactccggcccagccgcagagttttagcgttgggcagccacagccgccgccgccacccgtaggtggggctgtggctcaaagctcggctccgctgccgccgttcccgggagccgcgaccgggccgcagccaatgatggcagccgcgcagcccagccagccccagggagcggggcccgggggacagactctgccgccgacgaatgtaaccctggcgcagccggctatgtccctgcctccgcagccgggccctgcagtgggcgcccccgcggcgcagcagccccagcagttcgcgtatcctcagcctcagataccgcccggacatttgctgcccgtccagccctccggccagagtgagtacctgcagcagcacgtggccggcctgcagccgccaagccccgcgcagccctcgtccaccggcgccgcagcgagccccgccacggcggccacccttcccgtgggcaccggccagaatgcttcctcggtgggcgcgcagctcatgggcgcgtcttcccagcccagcgaagccatggccccccggacgggaccagcgcaaggcgggcaggtcgcgccttgtcagccgactggagtgcccccggctactgtgggaggcgtggtgcagccgtgcctcggtcctgccggggctgggcagccccagtccgtgcctccgccgcagatgggtggcagtggtccgctgtcagccgtacctggtggccctcacgccgtggtgcccggagttccaaacgtgcctgcagccgtgcccgctccaagcgtgcctagtgtgtctaccacttctgttactatgccaaatgtacccgcgcctctggcccagtcgcaacagctgagcagccatacgccagtcagcaggagcagcagcataatccagcatgttgggctgcccttagcgccaggcacacacagcgcaccaacaagtctaccacagtctgacctaagccagtttcaaactcagacccagcctttagtcgggcaagtcgacgatactagaagaaaatcagaacccctacctcaaccaccactttctctcattgctgaaaataagcctgttgtgaagccgcctgttgcagattccctggcaaacccccttcagttaacacctatgaacagtctggccacctctgtattcagcatagctattcctgttgatggtgatgaagacaggtatggaaatctctattttaaatatttgatagaaatgcttggccaacattgtagcttaggatgcaactttgggagatttgttgtcaacggaggcccttagcatttttaaatacaaaatttagtttttggtaaaattgatttagattgctgatgctgatgtcaaagggtgtaatgagcgaattggtcttgtcaccgttgtttaaaagcactaaaatgggtagggatgcaacattgtttactcaaaaaaaggtgaatttaagcttaatgcttaccatttaatggtggtagctagtgtgttatgctcccatagaattgtccttttcttacatatcaatcacacttgaacacgtaaggcagagagatttgtcagtgtgagttttgaggctgagacataataatactacaagttttcctttctggaaaaccagaaggtcctctagtgaaaaaaaaaatctatgtaaggaatcttctccagtgtatctggaaaggctggagacataatggtgaaatgtcaaatccggctttgaagatcatacttagttcagccttttgattaaaggaggtacaaggtcacgagtcttcccagggacttctctaagatactatttttttgttgttaagcaaaaaatgtactggaaagatattcttactttccatcagtctatttattataggaaagggaggttgagatcgatcctttaactgtagtgaaagctatagttcttgaaattaagagtaattttataataaaagtgtaaatgttaataattggctccctgtatttagggatgctttttttaatggcctaaataagaattagtgtattgctacaccagtgccacaacagctgatgtttggttatggtttagtgaggatttttgtggttttgaggagatgtcacatgtaaatttgacatacatattgcaaaattttaaaagctgacttgttgcaatgttttaaaattatatttaaaaattatagaaaaagtttcaggaatttcacagttagacatttctttgctggggtttttgtttagcgagaggctaattttaggtgtttttaaaagatacaaactaatattatggatttccagaataattagtatgtggaagaatacaatgacatgtatgttaaagctttctcttcctatggtttcttctgagttccttcacatttcttaacctcccatttctaattagccttgtatttttgttatatacttctgttggtttgaaaaatactcactgactgaaattcattcatcttctctgctttttgtaatttaaagttcatctttttttgtaggtgacttgcttatggggagtctttcttcacttgagaacgcttagagaataccacgtgtccataagtgagctcagctagctagtcattgagaaattttgtgtgtgtgggactactaagtaaactgactccacaagccactcagaaaaatccctctacttttatagttgctcccattgtcacacacagggacacacctgtaacacagattgagtttattttttcacctttggtaataatcaacaggcatcttcacttttctagctgccacaagccaattttttcctgataagttggcaaataaccttttgctttcctctgttcctgtatactgcccatatctcttcaagaaatgatgactggtttcctgagctaccccgctttctatacacacacacacccctccacccgagaatgcagattacattttcccttctgtgcacacctctctcagtttacagcatccatacttagattcctcagaactttagtacgatgataaggcatgaagcagagacttctgttgatagatggaaactgaaatgtattctttagggtatgacatcaaaaatgcatttattttttcctcttactgtattaagagttggtaatctgaaaactctgatttccaaatttgtgaatggttgaactacagatactactgtatcagtgttcttaccaattgcaacagttaattcagtgcaggggttttgatgtatgtacagtcctattttaaacatgacacttccctcccttgccccaatcatttaaaatctacattgcttaccaatgttcatttctgatttttgttacagtctttcattggtttttaacttgacatgctagtttccaagatgtaatcttacacatttgactgttttgtcactggtccaacatacctggtgaaggaataaatccattaggtagaaatagttgggttttttgttttgtgttttttttttttaatagaaagctttggttaaaaaaaaaaaaaagaacagggtattttaaaattttgtgtttgaaattaaataacagttttccaggcatatgtttaaattactgagatgagtacttttgaggagactactatcttaactgaaaattttaattttaatgtgattttgggttgccgccttaaaatctgcatgttttcaaatttgaaataaaaccaactggagtgagaggtcttgactaattgtgatttaaactttgcaagtagtttgacaaatttcagatcctaaggaaatatttgtaaataagatatatgctttttttaaaaaaaattaggactttagtaaacagtctatttctttgagaaaagaaaggaaaatgggaaattaacaaaaagattgaggtggtttaggttgatacattgaaaactcttatcttgagattttggttccattacctaatgcaaagttctatattggcttaattttgagatcatttataattaaagaaccgggccttatagtaatacatcttaatattatcacacctttaaaaggctgatggttgtatatgcaaaaagttctcaattagcattgcctattgactctacattattaattaccataaagtttatctttctggccattttcattagaaaggtttatggtcagttgttgagactcttcaaattgattttgtgtaaactcgtggatgtgatggttgaaaatacagtccttaaatatgtagctacttttatagtgaactttacaaaacttgtttaaactacgtacacacttaacagtctcctgtaaatgagaggaggtgcaaaatattactggcccttttggaaaaggaacacagtacagatcactttccatagatagccaaccaatgtgaactctgtaggccgcattccaggaactcttatgaatggctgcaattgtgagctgtcatctgtggccaaaagactgttgaaaacctgattctaaggatcctttggtggcagatatttctatgtcttgttaatggttttatttgtgtggtttgctaatgatcactgataaaatattatacattgtgaatgttaagtggtgtgtcctggtatgtgccataaatacacattttgtttgtacatttatatatattttaaaccaaattctgctgctttttttacttgaagtttaagtgagaggattaagtaaatgtataccaggaggcagaactgtctcagtcttcgacctctgttgtatgaaagtctcactgaattgaagtctctaaagatggaaatttcttacttgaatctctgtttcttggaagctgacatttatctgttaaattgtgaaggtaattttgctcttgtaggtttacagttgatgtctgaatcacatactagatactatcctatgcctatctacacgtttaagagtgttcttactgaggagttagtagtaaaaatgtaaattcgtatatatgtgtcattattgtttagcataaaaactgatactgatgtattcatcagggattactgatggataccacatggattactaaaacatactttattcataaacgtggcttgaaataaaagaaatgacagatttccaaaaaggcttacgattttccaaactacccgaaattcctaaaccatgagctatatctgtaggagtgtggccttttatattcacagtgacacatactgtataaaattttatgtgcactaaatcatataggccaaacattggtaaatttttttagaaaacatgatggcttatatgtgtgtgaataatacagatttccagctgactattttagtaacacttgttttttctttttaggagatcacaacccctgaactaaatcacctttatgagaagtcattttatataggactggtggtaggggtatatatgtcctctacttcctgagaataaatataatgccaattcatttgttatttaagaatcctgggccaggagcggtagctcatgccttgtaatcctggcactttgagagaccaaggtcagaggattgcttgatgccaggagttggagaccagcctgggcaacatagcgaggctttgtctctacaaaacatttaaaaattagccaggtctggaggccaacacctatagtcttagctacttggggaggctgtaggaggaggattgcttgagcccaggagctggaggctacagtgagctatattataatattgcactgaagcctgggccacacagcaaggacctgtctgtaaaaagaaaaaaaataattctgatagcactaatttggaaatagtgaaatatggtactggatctatgaatctggtacttcctaattaggaatgggagtctatctttctctgcaccagaaaagatcagaagcagttatgaacaaatagcagccccaccaatcaagtagtagagaaacccaaataaatctgtttcctaataaaggaatggtagttaggaaagtataaaaggaatctgaccttcctttcctaaaatggcaggagttggggaaggggaagtgtagaatgatagcagataatcaaaatggaagaaagtacagtggagtggcatgaaatatagtctcaaaagaaataggaacacttgtgaatactgaggaatggtgttctaattctttctttgaagaattgttttagtccagtgtgtatttccttttctgaagattctgtttatttcttaattgcattactcgttaaatacttaaagtatgaggaaggagaggccttacaaaagcaggtctgtctggttaaacatagcctgaatgatattccgtaagtaattccttaattggaaaagcagatttttggtaagaaatattaatcatatttaaggagtatgtgtagcaaaactcctaaattagaataaattatttaagtgtatggtttttctttatactaaaccagtgggcttgtgatttgaggctactattttcgatggtattgtattgagtccacagagaatatgtatacctgaatcattggtataatgtctttcccacagcaattcttgaacatatcaaattactcgatatttgttatattcttaatctggcattgcttagggcaaaaactgggtgtccctcataaaaaggtaggaacagtagccagtttgcaccattcctatacattattccatgactttaggaagtatactttgaggtatactcttcagatttggtttaataatattaaaggtatattgatggattgtttcctgtatgaaagtattgcatgatttctgctcttaaatcaggtgaattaaatttcatctggattgcttatctcaaatttaaagcctcaaatcagacttaaataattagtatttagtatttagtttgattcctttgtacccaagctaatttttgtttaaaaagaaaaagtgcttccatccttttaagtagtacatttatttgtgatgttagtgaaagttctgcaggtaactgagttaattttattagtgtttgcctgggacatatacctattattagggtaggcaggacaaataagtaaagtctaaatgttaaattacttaaagcttcttttcccataagcctttcctaaaatttgtctaaagaatattgctttgtagaagatggagtttgtgattaatgtgtcaattattgtaaataatgatggcatagttttaaatgttagttttaggctgttcatcttattacacaagtatataatttaatctgaataaaggattcccaaaggtaagtgtaaagcctctagtttctaaagtagagttagtatttagtttttatcaagtggttttatatgttaaagcaaaacaaatctttgcttggtataccgtctacctagtctttgaagacaaaacaaaggagggaggagctgttttgatcaaataaaaccaatagcgtgtttaattatgtgttaacatatgtgaatgaccattacagagacagtagagtcagacatacccgggctaaaatctaactgctacatttgactttgagctagttggtgtagatgccttgtttcctcttatgaaaaatggggattgtacctacctgggagagttttaaggaattaaatgatgtgtgcaagtaatttgaacagtctgtaacataatatatgtggcaaacgtgtatcacagaaatgttaatatttcagtgtccaaactgctctcccagatcacccctttacatgttataaatcataccaagaatcttccattttaatatgaaagcgtaattgtatggtatggatgtagtcagaaaaaaggagatgatgttttagtctagacgagtcatgatgttgtaagaagtatagggaattgtgttccagtcctggctcttctatcatttagctggtttctttggtcaagtcatttcacttgtctgtttttcttttttgagactttgtcaaattttaagattccttctagccttatgtatatgagaccatacattcaagtgtgcttcatgagagaactgcaaacttaaactttcttctttttacccctttcctgccacttgactattgtgtggcaataaatgaagtttgtaaatactcattaagtaggttgattgcccaagaaaacatttaaaacagcttatcagtcattcagctttcatgatgctctgtgagtagtgagcactggaatacaaatatgagactatgctgccctcctagatctcaggcattttcatcatcatgaaaatgatgatcagatgtatactttgacatacattggaggtggtgatggagtaatataaggtgctaatgggaacaatttgagacatcagatcagattgggattgggagggtagtagactgacttctatttaaaaattattctctgcataggtatttatatagttcaaaactcaaaatatataaaagagtaaaatcgaaagcctctctgctacctctgtcctccagccaccctgtttgtccttagaagtaacccattattacttgtacattcttttgaggctaactcttgaactaaatcttaaaatggtcattcagattaagtcactaagaagagaaggggatagttttccaagcagaggtaaaaggcagtttgtataatgatgtgaaagagtgagaatctatcatttggaaaatggtattgttaatttgacaagaaccagagtgaaggactttaaatgtcatggtaagaaatttcgatttttatagtaagttgctgttaaaggtatttctggaagcttttattgttaaaataatatatatcttgaaacgatttcagtatccttttagtgattattgcattttaaattataatcttatgataaagctgtgttaagggaataccttcagagcgctgagtcccaaaaatcagaattcttacctaatgaaatgtgctaaatattttggtacccctggctctaagtttaagtattctgtttccctcaatattaccttgataatgtcagaacatttggtacatgttgagatactctaccaaaatttgatttataggtagcataatttggaaactaaccttatattaaacacaaagcaagcttacttgtgtcaggtcctatgtatatagactttcatttgatctttccaacaatttgtaagaaagtggtttcttcccttccccctttcttatggattaaggaaactgagactcttaaaatttgagtcacctaggtattgggtgacaaagcctagactcatattcagacctttaacctaaagccagtgcttttgaatattcccagagttagaagtttgttttattacttggcacacaataagttaggaagaaggaagaactaccatagccactgatttgttgtattgtaaccctttacctaaaggatttttttaatcatttaaattccccagataataatactggagatggtgcttgttgatgttcttcatattgtatgtccctggtttctatttagagatctctgaagtcgaattttggcatagattaagagaaagaggtgtttgttgagtgctcaagtaccttatgctttaagctttgacaatttttgtagcttagttttgaggtatggaatgtttgtttttttctccctgttgtacttagttaccctacaaagatagtgtcttgcaaaaacaggtagacatgccacatgctttgagtcattttctgatgtagtattttcacatacttggaaattaatgtgatggactattgagtatataaagtcagagagaaaagaatgtattttgttcagtgatgttaaagaatatttacaaataggaaaacagcatttttgtttaggtggctgaagtacagtgtaaaccacatctcagtcttcctagaattgcttcgttggctctatatttagaatggtagtttatattaatatcaaataaactgttaaaaagctggtttcaaattttatttcttgagtggaagagaatttgtgaccacagctgcataaaaagtcagtatttccttctaataaaatttttaatttcagttgcctcttcatgctttcaggtttcatggactgtaaccttgaaatgatcccattaacagccttttccttgggctcttaatctcctcaattttatgccattccaaaatagaagtctctctgatgatcaagcctttcaatctttacagatggctcttttcccttctacttccttgatcagtgatttcacagacttgactcctttaatctgttagtcagtgtttggagactaattattgttgctgtttgctacaaacccctcagtttatggataacatcccagttatagtatcccagaaacaaaatttcatagcttataagactatctaaatttttacccttaaaatctagactgtttaaagttttatgtagtacatagattgtgtaactgtgtactatagaaaaccatgtactgtggcttcttcactttgaatgtatgtagaaagagtgattgttaattgttagcttttgcaaattaagtgtattctaatatgtgctgaaaactttaggtccatttatacagtattttatttcacaggttctttccacatcccagtatttactactaactacaaatatgttcgtttttcacttttacatttgacttaagagatattgcactattctgtaaaactgctggaattttataacaagtcatatgacttcatttggaaccaatttacctggaatatgaatttgattcaaattaaatatttgtatttccaaagtcagaggatctaaaggtcttttaaagatgccaggtgtggtggctcatgcctgtaatcccagcactttgggaggccgaggcgggcagatcacctgaggtcaggagtttgaggccagcctggccaacgtggtgaaaccccatctctactaaaaataccaaaaattagctgcgcgtggtggtgggagcctgtaatccccgctactcgggaggctgaggcgggaggatcatttgaacccaggaggcagaggttgcagtgagccgcgattgtgccattgcactccagcctgagcgacaagagtgaaactctgtctccaaaaaataaataaataataaagttcttttaaagaatatcatccttataaatatattgtgagtactctttaatgaattttgaattgtagacttgcagaataacttccaagatactctttcttattcttttgtatatactaccttcctctttgagtcactccatttaaactggaggtctccaaacagacctttgaggatagcaaactagttcccatatgttcctgggcaagcctgtttttttataaaacaaaaacaacaaccaaaaaaaaaaccagattgaatgttcaattggttcagttagttttcatttgatttggcagactgacttctaagtacagcgaaaaaagtggcctgacaaatacatcttaagaggatgtaagccgttaaataaacagtaggtagaagcctcttaagcttttcttgttattagcaggtctaatcagtgcctttgattgccttagacctagttaggagaaaagtggaaaaagggttaaaagaatagaaaggagttgaagtagggcaagcaatgagaaatacacgtattagtctcctaattaatcaaacagttactttggtgattctctggcatcttggaagtcttttttttttattgtactaataattctgcacagactttaaggctcttaataggaccccagaattgccatgttgtatctaaacctcattttgtagattaaaataatgctattgatgattcactgtatgccaggaactttacatttagtctcagttctttagcctgcaaagctaggtagtaatgtaaccagttaacagataaagagacagacttttaaagaggtcaaactttaacactgctatgtgtttagtgtagtggtttaagagcataaactctggaactagattgccacctactagctcagtgatgtaaggcaagttacttctatctgacccagttttctcctctatgagatgggagtaataatggtgcctacctcttagggctgttgtcagaatttagttaatgagtgtaaagcacttagaatagtgtgtggtacctaataaacacattcttaactgctgctgttctgctacagcatgggctaagaattttaaaagttatgtggcaaagtttttttggcttccagatgtacaggttgaaggtgggggagactatggaagttgctgaggaggagggaacaggtttgtcaaaagtttaaatccccgtggaaccagtccctagatttgaggtgaatcatacttactgggagatagtccagaagagcccatcagttaagagtctatggtgaaagccctagggaatggtagaaatgaaagataattatgataaataggcttttacccctaaagtaacattgtaccaatgctagaatcagaaagctgccaaacaattgcagcgccattttttgccctagacgaggaaaaaacacatataaataaatggattttgaaggtggaaatgtgtcaagtccaacccaggaaagaattcttcattgttaatcaaacctttgctacttttaacagagcctaagaaaagtttttatattgtgaagatatagcttaacttagtttatatgaatacctaagaacagccttgttaaactgctaaacaagatagatatttgtaaaggcatttgatatagaagagtgttgattaggctatgaatttgtcacatttatatgcacgcacacaaaattggatgctacttagtatttagtttcatctgccttacctctttattttataactgtgatcctgaattattgttgaagtctgctggattttgtccagtttttaatttcttctaaagtgttgttttaagcaaacttatgtggttttaaaatctttttattattaaaagttacactgtattagaaatctaaaatcttccatcttcttttgaaaagtagtgattatactgtacgttctcaacctcatttccatttgattctcggatctcacaggaatccttcaactgctttctaccaagcgttccatttgaacacgttaaaggaatcaaagagcctctgggataggtatgaatacttacatatggaatgcatacatgcaaaactgtatgcatgaattgctttgcactgtactggtttctcattaaaactgatctttgttattttaggggggaaatcacatggtatctagcatgggacaaagcagcaaaataaaccaaaaggacaatctctattttatatagaaaataaacatacttttctgcatcctgtgtactttaagtatatctatatttttgaagggttcatactgtgttgaatttttcttatgaaatagtcacttccccagtgtattttaatgcaaatgcatattctataaaataaactatattttaatttttgtgctattttatgttttttttctgtaaaagccatagtgattcaaagcaaaatgttatttcaaattatgaaattggaggaggaacaagaccaaggtatcaaagtaatcattgtttaatttttggcaagaaactttaacttcaagtttgtttgctagaattcactaggtctgcattactgatttgtaagcccctaaaacagtttgctttcttacagaaatgttgtatagattttactgttaacttttaaaaatacagaatgaagtcttggagttcttttatggcaaaagatactttggtttatctttctgcttaacacacattttaagtagtgtatgctctgttcaatcgttttgctgaatatttattagcattccatcactttgtgtttaattaatagaagttgagttcaaacaatgtttttaaaattcacacaaagctcgttagattcttttaactctgcctggcaacgcatttgtgtcttctggcatagttttggataacactcatgaactcaactccatctctttcattagaaaagagtattgctaagtgcatgtacatgtcatattaagacatgatacacattgcctagaaatgctaaaacagtcttaattcttcggcttgatttgcttgtgtgtgtcactctagggaaattttctaacagtatctttttgatggtgtgttccagaaatctttttaaatagttacttttagaacaggaagttttaaaatttgtagtaccatgtttataaaataaatttttaaatagttctgtagccatttaaattaatacataaatgtaaattgtgagatgagataaacatgaaggtttaatctttcaaatagttttccaaatgtagccagaatgtgagtactttggggtatgctttatagtttctcttagaaaaaggaaaaatagcactctgtttagaaatgtaataagagtagctttcaaaagtatgatgatttatttcaaatagctaactttgagctgtcatgatgttgatgtgaatgatatatattatttttatcagtgtaggaaggtttgagctatatttttgataatttgaatatgatattgaaaggtttattttgtttcataataaaaccaccatagaagttgcctgtacatcatttgttgttacagctaaatactccttatatgttttctttttttagatacctgaaacttttaaggtatcagaaatgaggcaagttgcgtatctatggtttctcatgggttgaaaatatttattttctctcctccttggagcctgttgttcagagccaaagaagttagtggatatttgtctgtagtgtgttaatgccaaaatataataaaatcaaaatataatcagatcagccattcttcactgtaagttggcctcgttggtactaaggtgacaaggccaacccaatggaaactgactagtggctttcttttaacttttcaactagcttattaaattttccattgagaggagcaatcatggctaactttattagttttaatagtctacactttcagttggcaactatctacagaattactgataggtatatcagctaataaagtatcatgagaccgtttattccaaatgggttgaagatttgtgtgtgttaagctttaaaaaatattaaatataacttctgaccttgattgttctggaaatcaccaaatcacattgttcatttttactattataaatttaggattttttttttattttactactaatttggcaaataggtatttggcaggggtgattctcctattaaagagagacatagactgggcgcagtggctcccgcctgtaatcccagcactttgggaggctgaggcaagtggatcacctgaggtcagaagttcgagaccagcctggtcaacatggtgaaaccccatctctactaaaaatacaaaaattagctgggtatggtggcacatgccagctactcgggaggccaaggcaggagaattgcttaaacctgggaagcggaggttgcagtgagctgagattgcgctattgcactccaacctgggtgacaagagcgaaactccatctcaaaaagaaaaagatatttggaagtttaagggactgcaagtccctaacgttatcttctacattatctatttattttgaggcataaatttgtctcgctattactagataacagattttaggctcctatttatgaaatgttggaaatcattttcagtaggggcagcttttaagtgcccattttcagtagacctaccctaaatagctgaatatccctagtttgattttgtctaactagaaagacaagaatctccttttttcctcaggaatctttcagtttagcagaatatcttttaatcaaaatgtaagtaactaatatacctttctcatattgacttaaagttctctaatggcccctttgtttccttccatatttaaattagaattggcaaattaatagacttttcaccaagcagcctgcctctgcctatatttagatatttctccttccatttatatccagtgctttactcagttattgtactaaaattgaagctaccctcaagtcttcctttccctttttctgtaggtgccatcatggtttctgtcttctctgtttgccatttgcagagccctcagggaatcaatcagctgaaccatcttcaaatgtagggacagtagatactgataacgcaaaaataatccaaccctttctgcagtagcccaaactgttttgagttgactctttattaaaataaatactataacttacatagttagctttctgggagattatcttactatggaggagttaatttttcctgagatcctagcctactggcatttgagaatagtaactttaaaatttgacttcctattttctaaagaacagttttccaaagttaatacttggcattgctttgttaaattggcagaattagtttagaaacctatcctgatgatcactggggagcggcaagcaggttctcattgggagtcctttgtttacaaaagctcagcgtaagggtttatagcaaacaattttaccctcttctaaataccaggtcactaaagtaaaggagtactaaggggaagaaacttcagctagactaaaggaagaaatcaggtagcttgtaaggctttaacctcatcgataagcacttgcagggcttttgtcttcattaagaaatgcataaatgtacttaaaacaagtgagagaacagttgctaggtgtacatccccttgagtctgcttgtctgtccttatgatagcaccagtatttagagagaagttaataaggaaagtagtagacatgggttattaacttaaaatgaaagtctagtaagtttatcctaaatttttttactagataattgatgatctctcaaattgttttctacagtgattattcacttattacctctaattttaaaattattggataaaaaaagtcttcttatttaaatagcctcaagtattttgtgtagggaacgccttccagtatttcctatcattgtttcctatgagatttttttttgaagctaggaataaattagaactaagctgtttatgtcataaataccattggtaccatatgagacaatttattttgttttgctcatctctaagaatcttgggtccatcattaacatccaccagtacttgttatcccaaatggtaaaactcaagttatgcaacttagctgatctagtttttgaatgcttggtgataggacttgtaaaatttttttattgaagtataatttgtatcggaaaagtgcaccattcataaatgtatagctcaaattgaacacacctgtgtgggcagcacccagatcaatacatagaatattataagcccctttcatgtcctcttcatgccccccatcagtcacttcccctcccaatcctaatttctaatgtgttatatatgtaggaccatacactatgtgttttgtgtctgacctctttcatccagtattgtatttgagattcatctgtatggttctgcatagttgtagatgtggactatataattttaaagaatcactcaagtagcttatttgttggagattggtattggttaaatgttctctcctagtgattatgcataagtatcttgaggatatgtacctgaaccattttgtgaccaaccccaatatattccttactaatttgtacctagtacttacataatttattatctgattatatttcaacctgttccactaaaagacatctagtagaggatagtacaagaagctaaaaattatagcatagctttttaatgattgtcaccttttattcttcctccctccctccctctttccttacttcatttcctccttcctttcttcttctcttcctctccttccttccttttattttactttttaatctgaaatattttagatttaaagttgcaaaaatagtgctgaggcttcttgtatgtcctttacctagcctcccttaatgttaacatgttgtacaaccttagtacaattatcaaagttaggaagttaacattgatagaatactattaactaaactacagatcttattttaattttaccaagttttccacttttgtaagtgtcctttttctgttccaggatccaattcaggattccacattgtgtttagtcattgtgtcttccattttaatttgtaacatagcactgttcctttattgaacatagggagtagcaagtctggtcttattggtgtggagagtcagttaactaagattgcctacaaatttccaccttttctgcagtgcttactacagttgctattctcacaggactctttcgtatcacatatataaatgttttcatcagtagtttagtttgtagttcttaagtgggggatggggcaggcccagggtaggaggggcaggtaatcactggtacttagaggatgaaagctttatatattccctctaaaactcatttttggatccctgatttagatggaaacctcagggcgtggttatgttcagatgacattaaatcaaggaagtgatagccattgtgaatgacagcatttataaatttaactgaaacaaatacagaaatcaagaaattggaagaatttatatgtaaattcagggaggttgaaacctaggttgactgggtatagtaaaaaaaaaaaaaaacatacttagatatgtgtgttaatggcattttgtagtattggttagcaagtgacagtgctgccacaaaaactaatgtgattttaggtgatgttgaaatgatggtgactaatctgttgtactccatttctacagaacagttgttctaaatacaaaactaactagaaaaccaaatttctttatactctatttgcatatccaggggtatttcaacaggcaggcctgagcgagcttactgaaaagtaaacagatcccttgggaaatggtcttgccatcactagaaataatacaactatcttcctgtctgttaaccagggatgctgattttaagtgaaatttaattttagttacatttaaaatgcctactctggagttttatttccccaacttttctaaatggaagtacaagcattggaattgaactcctttacttctgtttcgtcattattggctgtgattatcagtaaaccttaaagagctgtgtatttgcttaaggaatggaagggtagtaaactattctgcttttttagggaagaattccatgtcagaggcagtaaatgttgatctgaatagagaaaccaatggagcttccctcagaagaaaatgagtgacagtaagcttatttggaaatgagaattgccataggagtggtggtaaatgaagccccacaaataactaggcaccagttatcaccatgctgatgatttcagcagcatcttaaaaactagtgaattcttcctacccaggtgccaaggggaggtagagtaactcatggagaaaaataactacacattacagactgactggcagaatttaaggttaacttcatttagaaatcatggactatatatataaatgggcatcagtctaggtcatagtcataggactgtagggaaaaccaggtctccaagtttttaaaagccacatgcttggttatgaaattgatgctctcaaaatataattcaaattcttgttgatctggaaataagaatagtgtgtgggaaagaaagaaattgtatgtagagtgtagtgaaggtaggtcattgggattttaatggaagatgaaagaagccacttaaaactgtttgaaactcatgcctatggtgttctgtaaagctacttgggaagttcagtaaagtattagatgcctggtcatattataaagtagtctctttaacaatacgtgtttgtccccaattatagttacttgctatttaaggcattttcctgttaccatcttcagtggtcttagatcaccttttccaaccaaaagattctaaagccttaaaaatctcacttttttagagtaactcagaatgaagctgagggaaaataccaggaacgtttgcaattacctgactcagcaaaagtttgttctcctataattaaatactagaagaaacaataagatttagtaactgctttcagtgagcttggtcttaatatggaaaatggtaaatacattatcacatgattgaaagtaataactcatataaaatgtaagcacttcatatctctcaagtacagctggagggattggtcaaagcttcttcaggaggtggcttttgagttggaaactgaaaggtgggtagaatttggtcaagcagaattaaagaactgaggggaagggaacattccagttagaggaaatattgtgcaccactatggaagtactggccttatatgataaggataaagttaaatttggtaggtgtataacatttgaagacaggagaggagagcagttagattagagacagagattctagaaaggtactgaagcctgaattaggcaatggggatgagataggaattacaggattttacaactgattggtcatgataggggagcagtcaaacttgactccaaagtgccaaacctaattgactgagggaatgctggtactgttagaaagtattagtgaaagaattagtttgggaaggagaaagtagtgatgaggtttttgtttttagctgttttttggatgagttgataagctggtacaaagtcaaggtgaaaatatttggggtgcagctgaggctgcagacttgcaggttggtatagaaattaaagctagttgagatttaagaatgttttattagagttcaagctttaggaaaggccaagattgccaaggattagagtagggtaaagggtcaagccaggaccttaggcaataccacctgcatttagataacagaaggaagtctgaagaggatgattggtttagagattagaccattctgaggatattattttctaatcaaaaagaagagaaaggtctgaatctttaatttgaaataatttcaaatttacagaaaaattacaagaatagtacaaagaactcaatcttcttaccaagattcagtgtttgttaacattttgtcatatttgctttatcatcctaacatattattttaggaaccactaacaaggtgaaaccccatctctactaaaaatacaaaaattagccaggcgtggtggcaggcacctatagtcccagctactcgggaggctgaggcaagagaatagcgtgaactcaggaggcagagcttgcagtgagccgagatcgcgccactgcactccagcctgggtgacagagtgaggctctgtctcaaaaaaaaaaaaaaaaaaaaaaaaaaagagtagataggaaataccatatccatttaacttcagatacttcagcttatgtttcctaagaagattattctcttaccaacaatataattaccaaattcagggtatcttatattaatgtgctattatcaaatatgaatatacagtgcatattcagattttgtcagttattacaataatgtccttcataaccattttttaacctgttcgaagagccagtataggttcaccaattatacttaattaaacagttgtctttttcccttcctgtcttgtttgaatatgtaagtacttgtgttagtcacctaaaggattatttaaaatttaaatatttaataaaaaatgcagtattaatgtttttggataaaatactaggaaaaaaatgtacttgcttagctagtttgtactattgggagtattcgaaaggcaagggagtactgcctaaaatccagctgaaacgactactagagttggtgaagttttataaggggaggtcttttattgctcagagttgggtggtgggtggcaagagtaggagaacatttggatattaatgtgtcccttagaaattgaagtatattcatgtacttccctttctgtactgtgatttttatatgtatgtattaaattgggcttttaattattttgagttggaaaaaatagtgtaatttgaagacattttacatcaccacttgggtttgcaaattatgtattgctatcctgtatatactgttgtatcctcttagttttattctggtagttgtgttaggtggcttgtctgctgcgagatttttaaccacaaatctaaatctcattattcgaagtggtgtttcactggaccctaaacatctcttctcttagcttttctatggctagctgaagtgggacactaaacattctgacatctgttttcgacacattaccaggtttcagaattggcaaagagaaattatttcttaactgctcacccaccattatatatgctttccacccatatgtttaccaccttcctctttagtaaatttaatatgttatttaataaatttctaaacctaagtcaccccagcctattttgagatgttttgataattattttcaggtgaaattttagaaacagttttgaaaaaggtgggaatagctggtaaggtctctttattatttatttatttattcatttattcaattctttttttttcttttcaccaaatagattttaggtaaaccaaggctttgaatagaacagaaaagtgtatgtatgtttgtacatgtgaactaattcgccaaattcgatgtatttttttctaccgaatctaaaattctattgaagagctttttttaaaaaaaaaaaataataaataactgaacttgttcagacaagaaagaaatttaaggaacctggaattgttgaaccaggataaacatagaacatcttttagggtttcgtcattgttgttggttttccattctagtcctcagcaatttaaaattttaaattcacacctcttcagttgtatttaaatccgcagttgggcaaccttttgggaagaaagaaatattaatggaattattttagttttttatttttattaagatttggggtggtaggtagaggtagaagaaagagatgactgactctattctagcctgacattctttttgtttgtgtgcataaacatgctgatagtaatattccaagttactcaaatcagggaatatattaaatttttgtgattgatacagagcttttaaatgccttagcttaccaaaaattagctcctgtgtttaaactttagttggctacttctaaagtatttttcatatttgacagaaataaatttaaataagtgataataatttagaatgtttatccattagtaaatatcctcaagaaataacatttttatgccagtttatctcccagttgtttcaaagtttgaagattgttggttataaatactaaaagatttggaaggtgctattgtatttttcactttttaattgtgtgatatttggcccaaaaatagtggtgtcttcactaagttaaagtatgtatgcagacagcatggctgtcagtgtccccagctatttatgtggccacatattgagaattttatttgtaatttcagtatcaatgctaatggtggtatccatagtagctacgtattttctaccaatagcaagatgttcagaatatatgtaacctttgtcgtagaagacagaaacatctttctgcatatctgcctggtgataaagaaggtatattttccctagtcctacacagtatcggaaggggaacaaggagggaaaagagttgcagtgtctggctgataacactcctgtttacagtgatgctaaccgttggtcttcagaaaatttctgcgtttatttgcagtagctgtttttattttggatagtacttagtccagaaaatgttgctaaatgtatttttctagagtagtcataactacttttgtttcaagaaataagaggtatcaactcttcaaaaagcataatatattatggtttctttacaagttctgtttctcctgagcacagtggctcatgcctgtaatcccagcactttggaaggccaaggtggacagattgcttgagctcaggagtttgagtccagcctgggcaacatggcaaaacctcatctctacaaaaaacacaaaaattagccgggtgtgatggtgcatgcctgtaatcccagctactgggaggctgaggcacaagaattgcttgaacccacgaggtagaggttgcagggagccgaaatgccggttgtaacaccagaaggcnnnnnnnnnnnnnnnnnnnnatcccctttttgcaccctgcgctccagggcccagagcgagactctgtctcaaataaatgtataaataaatgttccatttcttttatgttagctattattaagctcagagtcaaaaaataggagggttttttgttttttttttttttgggacagagtcttgctctgtcacccaggctggaatgcagtggcacaatgttggctcactgcaacctctgccttctaggtttaagtgattctcttgcctcccgagtagctgggattacaggcaccaccaccacgccctgctaatttttgtatttttcataaagacagggtttcagcacgctggccaggctggtctcaaactcctggcttcaagtgatccaccctgccctgacctctcaaagttctgggattacacatgtgagccactgtgtccaacccaaatattcagctttctgttaacaaagcatgcagttccttattatacatatatttgagtattatgtaactggcttccacttcctttgattttccgtttttagagggagctctacctttaatttcaatatctttttcctttgccttctttctaagctgtttctactcctttgaaaggatcaagtgtataaatcatttgagagtaaacatgttaaaaataccaatagcctgtcttcttagagctgtttttcaaaggtgtattaatgaaattctttaagctgtgtatttggtgtttcttctaccaataggtgcatttgctataatgcataacataccaaacactttatatatgtgtatatacatgtacttatgcttatatatgtatgtgtatatatgtacatatgcttatatatgtatacatatatatagtttctggcatagctaattgtgtcttaaattatatcttggctcaaccacagatatatgaagtttcttgtcattgtgtgttatgtgtctttttatatgtgtctttttatttatttatttattttgagatggagtcttgctctgtcacccaagctggagtgcaatagcacgatctcggctcactgcaacctctgcctcccgggttcaagcaattctcctacctcagcctcccgagtagctgggattacgggcgcccaccaccatgcctgcctaatttttgtattttttagtagagatggggtttctccatgttggtcaggctgttcttgaactcctgacctcaggtgatccaccacctctgtgggatcccaaagtgctgtgattacaggcgtgagccactgcatccggcctttttatatgttaattttttggaacatactgtcttcctagcagttttattttatttaggtacatttgtactaatttttaaagtaaatttatctttgatattttaaagcttattttttcaatatatataacctatggaatgactctgtgtaatttattggaggacataaagggttgccctgtttcccccctttctccatttaaaactaagtatttctgaccaagcattggtttatcatggctaggatttctccaaacaatgtagtgaacttttttgaacagcaggttgaaaatctggctatattagtgggtagtcttatagaattttcagaatcttttaaggaaatgtggtttaaacctgaaaacaaaattttctatcaaactaagataagcacattcattaaaaaaccaagttcctttaggaactcttttagacctgtttgatttagcatatccattttcaagtaattacttggaaattataaatcatctaccttcttcccctttcactgtttttttattttaatatagtttcaccttctcacaaaaggaaatgataaataactgtagggaatatttgggatttggttttggtagcagtcttgccagagattcaagattatgattgataatattagtacagttttctcattaaatattcatttttaggaagaattctaattttaaattttgaagggtatctggttaatctgaacgctgttcatctgtaactactttagttacccaatttcatttcaggttgttaataaggatgtcctacatgttggaatttaatgacttaaactcttgaaatatgaccctgtacttggtaacaactaattttgaaaatatatgcttaggaaaattttgatatataacttttgtatcttttaaaacgtatacagctctaaagtcctgatttaaccatatatttgtgtaatgtatacacccttaaaatttttttttgtaagtttcgtagtaaaataactgcttcatatgactggtttaattgtatcttccaaaaagactttccaagcatttaccgtaacaaggctttttttgttggcaggccctttaacaaagggtcaagcagtcggccctttaacaaaaggtcaagcagtcggccctttaaatgaccttaaattaaagccttgcagacaagcagatttaccagcattatagataagtatttcaggaagtatttactttactaaatatgactgtatatttgtcctataaaaagtaaatcttcaaaagattttaaaaattacagtattttggttgataggagataagaattttattaaaactttcttaaaacatttggtaatacattaatgaaatgaccacaactttaaacgaccacttatcctcataaatatggatttttgccttcaccaggtgattacattataaagctgtgctttcacagaagacaaaataaagttgtatgatttatattgaagtcaaatgtgttgtgagattacatttggaaagattatattggaaaaattctaatagtttttcagactacgtgagagacttaagtgaccatgtgtaatagaaaagttccactgaaagttaaaatctgtaacagcatgacccagcctgtacatttgggtcaagtatcttttgagatagctgcagagtttcctttacaatgctgtctttcagttttctatagctttatgcgtattgatcatcctcagtaagggcccttttctttcccccatcccttccacccctttatagtgttttatttaggggattaatttaggcaaaactatgcccacaaatctatgggtttcctttcctatgggttactggcaactaaaaatataaatgtacattcttatcagacagaaaatgttattaatgatattattcagtgattaacatagatgcccaattgaaagctttctggtaaaatttaataaatttaacaggatatttttaatgaagtgatttttgccattattaaatcttcctacctccagttttcttccgtgcccatatacaggtgagcaatagggaccactgctgcataggatacattgttattcggttacataaagcacataataaaatttaattcttgccattatgttgtctattttcaaaattgggggtagtagagacagatgaagatttagatatagaaatggaattctgtcttaagcacttaaatgatcggtatggattgttactgatccagccacccatgctataagtctagaaactcagccaggcatggtggctcatgcctgtaatcccagcattttgggaggccgaggtaggcagatcacgaggtcagagatcgagaccatcctggctaacacagtgaaaccccgtctctactaaaaatacaaaaaaaaaaaaattagccaggcgtggtggcacgtgcctgtaatcccacctactcgggaggctgaggcaggagaattgcttgaacccaggaggtggaggttgtagtgagctgagatcgcaccactgcactccagcctgggcggcagagcgggactccgtctcaaaataaataaataaataaataaaataaaataaaataagaaactcatatacatggatgtggaccaaacaatataactcaaatgcctttctacaggactacaaagctgtctgtatcaggttatggtgttaaatcataatttctggatcatgatcttaaacctttaattggttccatttctactttactctttactaacaagtatcctgatggcctgaaaatccatgttgaaatttgaagtttgaattttccagatcaaatatgaaatttattttcattttttaaagtacaaaatatcagttgtataatcatggtaaaacataaaattttgctataaaagatttttaaaggctatttgattaaaacatttatttacttaaactctttgctagaattttttttagaattcagcatcggaggaggaatgtgacataataatgatcgaaagccgaaagtttaaaagttgtgatgccctcacatggttggagggttattctagcttctaaggactgaatgttgtccacaagagtgtcatcaggtcataaattggtaagacttaatggcttagattttatgtattatacctgatgttattgtattgagatgaatatttatgaacaaaatgagcacattgtgtaagagtatagtattaaatataagttaaaacttggaattttaaatacttggagtatgtaagcctttcgaagtctcttgaggctgaaggccgtatctttgcagtggtgtttagtaaatacatcagtttaaaaaaagaaagtgaaatcctgtattatagtaagattattaaaatattgctattgcatctgctgtagatgcctacaatatagtgaagaacccaaatactttttaggtgttataccaggagatatttgagaaataatatattcatcttttctttaaaaaaaatccattttcttaataacatacagcttaattttattgctttggagattttatttcttaataaaagacatgtttcctctaaatgtctaaaataaagccaagaaaattttttcaattcttacattgagaatacctaagatgccaatatcatatgaaaatgatatattagaagtcattgcacattttttatattccccgaaaattaattttctctcagtattctgcttagaaaaaaactactttgttttgtgcagtttcttattttgctttgttttacacagctgtattttgtagggggaccattggaaggatagagtttagctcaggataagaccttatatcttttaatctcaagattatagtattttgcagatgaagaaaaggagtctggattatttgtccaaggtgatataattgtagaattcatattttcattaaagtgtggtatgcatatcctgcatgtcagtcaagaattatttgaaattatttattttccaaaaaagccagaaggcatgggttgatatcagctaaacaggccactatatatattccaactttatccttaaccagagatatgttattttatcctttgcccattctgccttttgaataatattctaaattgtttctgatatagtattccatgacttcattacattctgtaagcttaagtcccttaagccagtaattgcaatcaatagtagtctggaaggaaatacaacaaactaattaagttatctcttattccgtatacttttctattttctttattttctataatctacataactttgataatcaggaaaataacttctaatttctctagtataggatatccatatgtagtagtcagtggctggggttcaggagatcatgaaccatgtgagattttgggtagaatttttttatgttcacttttctgtgaaaggttcagagcatttgtcagatttttttttcagagcatttgtcagattttcatctgtcaaaaacagttaagaaacattgctagtgaatgttttgtgtcaaaaggacaatccttgttagacacctaagtatgagtcgtgaaagaaatttctaatgagaacattggtcatatgacttctactgatgtttattcaatgctgggttactataaatgcccattagactgatgggacaaatcagagccaagccacatttagtttaggaatttcgtactgtcagtctctgtgctcaaaggtcaattggatttttctgcagagtagtcgtgttttggctattgagtgtcaggcactgtgctgaatatttttggcacattatctcatttaattttcacaaagtcatatattaatagatattatcaatatcctcagtttacagagaagaaaattgaaagcttagggaagttaagtaacttgctcaagtcgcatagccattgagtggtggagctagaattcaaatcttattactgactggaacctgggtatcagtatgctggtatcctctgaaaatttgaaggataagataaaggagaattttacattgtatgaagatgtgaattcataaatttgatttatcttgaacttaagtagcaatgggtcatcctccattacaaaactatcttttattatttgccaaaaaataaatgttggaggttgcttactatctaaaagttaagtattaattgcattaaaaaataaattctttttcaggtttaatacttatgaatataagcaaatatatgtgtatttttttttttagaaaagtcttagtacttattagaatagtattattaaggaactcaccctttaatatttaggatttataaacagcaaacactaggaagcattaatttaaaaagcagctttgaactgcagatatttcttgggatagtgggatatattgcatgtaaaacccttattaaatgctatgtgagagttttccatttgcctttagttgcgaataattctactgagaaacctccttttttgcccacttttaaagcatttatcaggcaaaattaattttttgggatacatgaagttttttggttttgttttcctttgtactttgtcatatcctttttgttggtttaattttactctccaatgagctccacatcttataaccttttccctgtttttaagtattaataataaaaggttgaatctgcaataatagtactgcttaaaaccataagaatttgtttgctcctgagtgatgttgaaatagtctgcagagctagtataaactgtttctttagcaccacgattaaaaatgcacaaacaacgtgataggtcatcagaatatgagaattctatctaaaagtctttttatatatatattaaaaaatatatatataatacatataaacatataaaatacatttgtaccccaacttctgtagtagtagtatgtttgccttttcaaaattcaaactgggaagtttggaaaatagaataagaataatcatacttaatccaagtttttaacacaattaccatcttagtgtttgcatattcccagacttggaatacatatatattaatagttgcaatcatggtagataagtagattttcaatagtttttaaactgtgtagttaaaactaaagctaatactgatatgtgatacgtttttaattttgaactgatatttgatattttgacatctgtgatagcattccctcctgtttttccttctaccttgctggttgttgcttctcagaccatttggcaggctttcccttctgtctgctcttttaaatattattggaggccgggcatggtggctcatgtctataatcccagcactttaggaggctgaggtgggcagatgacttgagcccaggagttcaagaccagcctggacaacatagggagaccccgtctctacataaataatttgctgggtgtggtggtgcacacctgtggtctcagctacttgggaggctgaggtggaaggattgcttgggcctgagaggtcaagggtgcagtgagccatgatcgcaccactccactccagcctgggcaacagagtgagactcagtctcaatcaatcaatcagtcaataaatagagtcatcagaatgctgtcttcttacattcttcatcgtggtaagagcttatagatggcttccatgcacatatcatctttatgctataggaagtcacctgtatgctctaaggtgctcaaacccattacttccagcctaggcatctctccttacattcaaacttacctgatctctcatagctggttaatcacaaagtactgccatatctgcctcctgagtgttttgccagcctatccatctcttgtcctcattcagtgtactatcctttcttatgtgaaaatgcaacaaccttctgactagtccttgtcgtttaagttttctaatgtggccaactgcacctactgttctttttacttggaacatttttttgtacctatcttttttttctccacccaactgtggcatttcctctactaattctttcctgatccaagagcttatgtgcccccagaacaccctctaaaatcttgctctgtcttagcacttatcacacttaacatcttatatatctcctgcactaattgtaaactcacaaactctggaattatgtttatttgacgttgtatccccagggtctgagaaatgtttaagttcattacaacccctttggaatgtggcatcacaaaatttggtgtctgaaaataatgttagagattattgtatacaattagagacaagactcaaatgtagaaaccacattacctaactcctaagtcagtgtttcttgtgtatttcatgacatttagattttgaccactataaattattacggcaagttattaggtaacatagtaagtgtttaccatatgccagatactaatgcattatctcactgaatctcagtacccggtcctattattgtcctttggggaggctaaatattagcttgtctaaagtcatatctcggttttggtgcagtggctcaagcctgtaatcccagcactttgagagtccaaggcaggaggattgcttcaggccaggagtttaggagcagcttgagtaaccctgtctctacctgcaaaaaagaaaaattagctagacatgatggcacatgcctgtaatcccactgaggcagaaggatcacttgagcccaggagtttaaggcagcagagagctatgatggcgccattgcattccaacctggaagacagcaagactatgtgttataaaataaggtgagagatgggattcaaacctgggtataactccagaaccaatgcccttttatttaatatcacatctcagaatttatcttctgagttttgaattataaaactgagttagaagggaatttaatggtcatttattctaaccacctatcctatacttggatcatgtctacagtgttcctttcaagttgtcatccagcctctgaatacctccagtgatgtcttacttttgcatcctggtctctttttgtatttataaacctctcataaaccctttctgtaaaatagggaatcttaaaatgtgaagcagaaaaatcagatgattgccatcacttgaagcatatataagcagcactaaaaagtctgtggagacattgaactgggtacatcctctagatatttctgtattttcatagctgctataatcaagaatgtggtttccagttcatggccgtaagtcactggttttagtacatagtcataaagttctttttcaaaaatggataaggagacattgcttaataacttagagatcacaaggacgtttctctacttattgattctagtgatgatacaaggacttcatgggaaacctttatatgtgacctgatcctcaatgtaaaaagagtgaaataaatgtgaatgacttcagactcctggatctagtttacatataacttgcacttattcatgagtcatgcttaaaggcatggtagtttgaattgtcttttttatctgaccaaaagcatttaggatttttaattcaccctttagacttaattttgattcaatagagagtgagattagtcagctgagagaacacatagatacttatgaggcatgattatacaatcaagcttttcaccagatttacaaatggtttctccttaaatccatgattctaatgtaaaaaagtctctgtcaaggtttttatcttaagatcattaagtttttaacatccactttattatccatgaagtcttctatgatttagtcatcaccatgatcagtatatggagttaccaagtttcactggccatggcagcagtaacctggaaattcatagagcctagcccttttctgttactcaaacttgaacccgtttttctatttacatcaatttgcctatattacatagaaactggcgcactttccttctttctcagtaggtaacaaccagatgcaaggaacatcaaaaacctacctttattggggagaaaaaaattctcgaggtctgcccatattttactgtgttccagcgatacattagtttctaatagtttaaatagttggttaatttcttagatctttgtcctggcatgatgagctcaatataacatctgtttataccaaacttataaaatataattagataatatattgtaagttgtattctgtctttttcttcaagtaatatgtttactatcaattatatgcagagtagtgttgtaataagtagaccctggagatggacagtttctgcttttaaggtttaattcaagagaaaggaacatttgataaagacaaaaaaattatggacgaatcagagaagtggagcctgttggcaagaaaggaagaaggctaaggaaaatgtaggtggagcattccatctcaagtgacagtcttatctctggaatctaaatcgatttaacaaatttcaggtcatgatgtaagtgtagaattcatcataaaagatttcacacaaactattgtaaaattctgtcattcaccatgtctaaattattagaattattacctaaaagaattcaaggacatgaatctagactgaaatgataaaaacttagatgttaaactttttgtctctgaaaatgtgcctacttgagtgcagttttgcttgagtgaaaaaaacctaatgaccctttagattttatagtagtgctattttttactttatgtcagaatccctttgaataaggtaattctaaagcagtgattctcagctagggtaataatttgtttaaaagcaaacaacacgttataccacttttcttatttgcttttagtaatatttattgttgaattttcatataacactactaaaggaagacctgggatatttttaaatactctttttggaaatttttatttgaattaaattagttatatttcagtgggctttggaaaaatttcccacagtaagttaagattattttactctaaataatgaaacatcgagatcccaaagaagatccgtaagaatgttattaatgtccagtccacgggaatcctgtgtttaatatgccttgtacaggagaatcgcttgaacccaggaggcggaggttgcactgagcagagatcgcgccattgcactccagcctgggtgacaagagcaagactctgtctcaaaaataataataataataataataataataataataataataataagccttgtaaatgtaaatctcaagtcaaacaatttttattaacatatactttgtggctgcattaaatctttaacatttaattgaatacaaaaaatcaattaaggaataactaggattttattttgggtgaaacataaatataaaacctgtttcttaatactaatcataattgatttttattcatgtttcactgccttgggagattaactcttatttaattttcccaagatacactgggaaagtagaccttataaagtgtcaaagtccaaattgatccaaatgataaaaggaactaattgggttgttgtgtgtactgttgtaaacagtctcacataatccttatagccgtcctttaagatatgtacaactgtatcccattttatagttgaggaaactagtttcagtatgttaacttgctaggatcaccccactagtaagtggttggagtttggattaaaagtcagctagcctcacgcctgtaattccagcactttgggaggccgagacaggtggatgacaaggtcaggagttcgagaccagcctggccaacacagtgaaaccccatttctactaaaaatacaaaaagtagctgggcatggtggtgcacacctgtagtcccagctactcgggaggctgaggcaggagaatcgcttgaacctgggaggtggaggttgtggtgagctgagattgtgccactgcactccagcctgggcaacagatcgagactccatctcaaaaaaaaaaaaaaaaaaaaatcagctagtctaattctaaagtctatgcttttaagccattttattattctgtgtgaattcaactttttgcttagacaactgctgagtgagaaactgtcttacccctcagaatgtctgaccccagaatgaagtggagaagaaaaaatactttagacaagagataataaactgaaacgtagacaactttaattcttcagggcctgtatttagagtgttgcctttatatttgttgaaagtgaaaaatgtaatccttggctgggtacggtggcacacgcctataatcccaacattttgggaggccaaggcaggaggatcacttgagcccaggagtttgaaaccagcatgggcaacagagtgagatctgtctttacaaacaagtcaaaacatttttaaaaagaaagatgtaattctttgctcaaacccaagccactagaattttaaaaaacattccaaatggaaaacattcattgatttattaaaaataaagactaggctttccccccacccccaatatgatatattctgttcatttcattaaggaatgatggccatgcttgtgctctccctttagtctaaatcagaatcaagcaactgtctctttaaaaaccccatgatattcttctgagtttagccctattttgaaacggtcccttgacaacctttatttattactgtacttggactttaggagacagattaggaaggagacttggtagcaaagaaaaattagttaataactttggagcaaattctagtcacgaaatcccagtgactagcctaatataattttactttgtcaaatatattgttcatagaattatgctttttctagaaagctattttaactaacatttctgcactttcaagaaataggcataaagaaaagaaataggcaaaatgaaaagatgagcaaaaattatgtgcttttcactggtatttggcttttggtatatacatataccaaaggggatagtctcatttttactttagtcaggcctcactgtagaaatgggattgagaagatatttaaacaaggcgtctaaacaagaatgactttaataaaaagaaataatatgttgaatgcttgagaaagaggaggcaaatgtgaggccattagatgaaaagaataagtagcattcctaagaatagtttcttcccaagcccatctttttccatgactctttacatgttagtgttctccagtgttttggccccacttgtcttttcattgtttatgcaagtttgttttctcctatggtttgagtcgcctactgcattcttacaactttcaaatctagacttctaggccagagattactctggagttctcaatacctatatccagcagccttctctctatatttctccaacaggattctacatttccatgtctccaaattcagtagtcccaagtgaaacttaaatttcttttctcgtctttatttgcagtgctttatttgcaccacctactccccaccccacttcatccccccaccaaatctagccacctttctgtgatacaccagccaactcctagttgctccaagaataaagccccaggcatccttagcattttctttgtcacagatagtctcttttccttatcatctcactgatctctcaagattctgtatgcttcaattgaaacttgaaatatgttctaatccctctcaccctgtttttcctctgaggtaccagtgtacatctaagtctaggtaactgtcagtcttacactatttttccagtcaccaagaaataatttaaagtagcaggtattatagtgtcgagtttttaatttgggcttacatcccttggtatgtattattcactcctcaataatgtgctgtcatcagattaggtagttgctgctatgtaaacagtaaaatgaaatctctttcaagagagcctgctctaaatgttaagtacttcaatatcaaggaaaatgccaccctcctcatacccctttctcctgtcctttcttaggtcttactcagaggaaggaaataatcttttcaacctgttaaactttgcctattgttagtctattaagaaataatgatttcatctaataagaaataatgctacgtaggatgactgcttcctgtaatcctagctactcaggaggccaaggtgggaggattgctttagcctaggagttagagaccaacctgggcaacagggtgaggccctgttgctaacaacaaattttaaaaatcagctgggaatggtggtgcacacctgtagttccagctgcttgggtgactgcgactgaagcaggaggattgcttgagcccaggagtttgaggctgcagtgaaccatgatcatgccactgcactccagcctgggcatcacaagaccccatctctataaaaacaacaactagctagcacacaaagtcaagtatcttaaataaatgtaattccatattattataacatttaagtattaacttgaaataggatattaattaaactttgtttggaatatttggactgtaatagtgaaattgctgtgcaaattttacttttgtatcagtcttcaatttctccagactaaattcttatctcttccattttgaatgttttaatagatttttagttcagctagttttaaaacgaagtttctttaaaatggctctacaagaaaaaagtaattttatcagaattttactaccaaatattaaaatgatccccccaaaatatcataacttggaaatgtgaaagagatctggaaaaagaagataatgttaattttaatcttgtatatatatatatatatataattaggggataaatttttaatgtaacatttttattgtgtaagtttacatgactttttgtattatagatctttaccacaaatttttaccatttgcttaccagatttactttgaataaacagaaatcgctgtactgggagctataaacataatttacatcacattctcagatggttataattcactctaaaccaagaaacaggatttttacaaatcacaaatatcacttatgttgatcattgttttgtttgttgaatatagtaccttatcttgcagaatgaaatagttgctagagaaaatagagttggcacctcttccctcctttctccctttcctattttctgtcattgcttttcctgtctgccatttgttcatgtctggagtttacactgtaaaagataactccttcatgagtcattttcattttggaacatgtttttcattgttcttcaaaatgtagtagaagtactcttgcttctatctctgtcctgcatctgcctgccttcccaaacagccactttcttaatgtgtgtatatccttctttatgtgtatataagcaaatcaatgtatattatcttctttaatgtaaattataatgtattgtgcacacatctgtacctttacttttaaagatctccagaatacattgttcccatctcagtactagaaaagtatctttgtggttttttaatagatgcatactatttaattgaatggatggctacaccatgattcatttaaccagaagcattgctgttataaacagtgttgtaatgagtagccttgttaacattatttgctatgtatataaaatatctagaggataaattccaagatgaatgattgctggctcagagagtgaataattaaggggaggtcgggagaggagagaaaaggagagaaatctgttttggaaaatagtattacattatagttttaatttgtatttttattttatgattcagatgttgagtattttttcatgtctttcttgttaatgttcagtgtgaattctccccatttttctattgggcatctggtcttaacagattttaggaaaatttattagagactttttaactttaaaaaaaaattagacatgcagttacatagtcctttcccaccaaagtattaaagaaattctaattaaatgtgtttatttaaagttcttagtacagatgataagactgactctagacaaagggggtctaaggtaggagatggacttcgtatagattgcatgctctttaatctacgctttactggctagccatttgactgaaattaacaagataaatataaaatatgctgagggcattggtgaacaaggtttttgtagaagatgctgacaataaatatcaatatataaatatttaactgagtttttaatagttccttggtaaaggcattcatcacaccattgcgggactggctacttgagaaaaagtaacacttaagttttgtaagtagaaattttacctgcttgctcaggatgaataatagctttaaaataacttattttgtgttactgctaataataatctctatggggcattttgggtttttttttaatcatgaaattaaacattatttgttttacattggtagaactgatggtcaataattagaataacataacattttgagttcttagtttaatttattattaacttcacccaagttttattcttaaccatagaggtttgcattcagccagaggttgtctatatgaattttatttatttaggcccttttgaaaggaaaattgttatttgttcttaaattaagctgtaaatattttttagtctcctcttacagaagagtggtggatttttaaaattatatttaacctcacaagtttactgaactgtagattgattagatttattcctttgtaatcagtgactcgcattttcttaattttctttctaaaaaaataaaacatgcatttgttagagaataggcaaaatgttacccaggttagaattaatgcattttagtagtaatgatgttattacagtgcttattttgggagatgggagtgggtggaataaaagttatagatgatttactggaaacagtgtatgattccttaggactgcccccaaagaaaggtatagcttccttctacttgtgagtttctgaagaatcagttttagttggtttgggcaagggggtgtgagcatgaagtatgccaaatttaccaacttaaaggagtttgtattacaaaagatttgattgtgtaatttggagagttcctgtagtgcatttatagttgtgattgtaactcaatgcaaagttagaggagtctttgagtaaagcaaggcatttattttatttatttattttttgcagtattttaattaaagatacataaaatttttaaggcatcttcagctttctaacaaaccagaagaacattttcgttcttagcaattaggtaaactgtatcagctataaaaagatcactaagcaagtgccttttctaagaggttccctcccttattctcagagctgaacctcttctaggaatttgccagataagataaatggcatattctgagcatggtttaatctttggatccatgcttatggtttcacaacttaacatttggtacttagttaaagcactcttaataatacacataattctggatttatttcaggtcattagagattattttttcacagtcttactattatggaagaaaatatgtgtgttttgacattaggtccaggtttgaatcctgttcctagtattgtgtctttgagcaagttacttgacctcactttcctcaactgtaaaatgagaatgttgctcaggcttattgtaaggactcattaagataaaggtgtgcctgccctaaaatagacaatcattaagtgttcttttcctctatcttgttgatttgttaattagcatttatatctagggaaagacaaagtagtcaaaatatgtccattttgaaaaagagaagtagttctcttattttttttagagacagatctggctctgtcacccaggctggagtgcagtaatgaaccctgagctcctgggctcaagcagtcttcccacacagcctcctgagtaactaggaccgtgggcttgctttcttttctcttttctttcttttctttcatgggttctcactatgttgcccaggctgaatttttttattttaaataagtagtcaccatgtctctgtccacattactacagataaagaaaaaagttggtttctcatagttttttaaaaatagagatcaaggctgggcgtggtggctcacgcctgtaatcccagcactttgggaggcgaaggcaggcagatcatctgaggtcgggagttcgagaccagcctgaccaacatagagaaaccccgtctccactaaaaatacaaaattagcagggcatggtggcacatacctgtaatcccagctactcgggaggccgaggcaggagactcgcttgaacccgggaggaagaagttgcggtgagccgagatcgcgccatttcaccccagcctgggcaacgagagtgaaactctgtctcaaaaaaaaaaaagagagagagattaaattagattacctttttctttagtgattttaacttgtgacagagttggaaattcttcatccatcctcttgctttctcagtaatgttgcaagtaatctcatggtaagagtaaggaaacctaggaggaaaagctgtggtggagagccagttaggatcaattaaaagatgaacagcatggaaagccaacctgccttactgtagcattgatactctgagttatactttttctgtgagtgtaagtataattagctttaaacactgaattcaagctcatttagttattttggagcagcaattccagtaaataaatattttcttgtaggtctttcttactttccacagctctatatttctgttcattctctccatatccacaatttttaatgcatctgtaaatgctaataaatgtttgatttttattctaagaatgattcatagtaaatagaaagtttatttttaaaaattatcttttgactttatttagcatttccagtttaccataatagtttaaaaaagaaaattctgaactcatttttccctcatgcttctgtagcagtaattgtaacacttgatttaaaattgacttatttcagtttgagtatgtatctatacatacacactaatctgaaatatttatactaccaccattgtagggtaccgggtatatatactttgtgctggaagtaaagacaggaagccttttcttagggagcttaagtttggaaactggttaaaccatcaaaatataatgtgctgaatataataattaaaaagaaaacaaggtatatagtattataacattaggtgaaggaaggaaattattgattctgcttcagttgatctttctcattttaaaagagtcaaatctcactatgataactttgaacataatagaaaacatcttgataccctcattgaaacagtatttttaaaccatattctgggatcttgaaataaaatagtctcttatttgcttaagactaccatattggtatcttcatcgtaaatatggctaaagcagtggttctcatactttagtttctatctgaatcgcctagagagtttgttaaaatagattacggggccccgccccaagagtaaatctggggtgggtccaaatatttacatttctaacaaggtcttggtgggtccaaatatttacatttctgacaagtttccaggtgatgctgatgattctggttcagggactacactttgagaactgatttatctgaactcaaaaaattttaatgccttcctcatatgaaccattaattgtttcaaatctatcatatctaattactatcagtatgcattgagttactatgtgctaagcactgaattcacttattcacaaagatgaagaagttatggaacctttctcaaagagctcaatctaataggatcaacagtggtagtattacaatactcaaagtaatcactgtctgtattgagtgctcagtgtgccaagtactatgcattatgtaaactcatttaatcctcacaattggcatataatccttattttaaatgaaaaaactgaggtctagaaaggttaaataatttcccagaattcatatagtgagtatatggaggagccagaatttgctattctgcctttttgcactataaaaagtttgcgaagattggtagaccccagaaaggatggagtaattggctctaccttagaaaatcaaacagcatcacagaagagatggcactggagcatcttaagggacaggtctaagatagccagatgaattggaactgtgagcatttccagctgagggagcagtttctgcaaagccaaggaaacccgagagaacatatgttccacagactacaaatagttgtataagaccataacacaataggcagatggagtataagaggaaaacagactgtataaggcagaggtcaaagtcataaagaattttatatgccaggctaaaaagttttaaaaatagaattaggcttcttaatttttcctcctataactttcatttgtaagccagcagttctcaaagcatagtcagacagtagattccacatcatctgggaacttgttagaaatgcagattcctggttccatgcctactgaatcagaaactctgagtgggggagcccagcaacctgagttttaacaagacctccagatgattctggtgcatgctaaagtttgagacccctgcagtaggttatagaattcttgaataatagccttcaagatagttaaaggtcactatagtggtagtaattatatttgacactgatttattctattagagtacaacacctaacagttgaaatattaacaccatttaagggatacatcttcatcatgatctatttataccttgcaaacctgtttcttctgttgtcataaaagagatcttaggacaagagtttgttaggtcagcattcaaagaatagcatgctaactattcttccttagctatgggaatcattctaaaactcgctgactgattttaattatcaaaaaaaaaccccagtaatttttgttttttttactgcttgttaatacataaaactgatgttgtagttagtatttaaggtgtgctatttaaaccaaatgtgttgaaggaatcaaatgatttaagtcatgacatgacttaaaagtaattcaatctttccttgtcatgtcaataaaaatatagaaagtataatctgggattcccaagcaaactaatttaaatgcctgtcaccgtcttttttgccaaaatgtgttcagtatttgtggtgaatatgtctgcatggtatctggcactgaagtatatactaaagcgttatggttgacttagtggttctgtagtttatagttacatatagtcatactttgcacagctcactaaaagcatttaaagcccagcacatataaagtatttgttaatgatccataaatcctttctagatattagatatacaaaacctcttttcatcttagaaatagtagcagcaagaagtgaaggtagtatgctgtaattaatgtggttaatgctcaaataaacaaacgtagtttcccatgtaatgattcaagatttcaaggatttagaagtggaaagtccattgaggcattgacatcaaccccttgttttacagatggggaaactcagatccagggaagttaaataggtgatttgctgatgtcccataggaagtgaatagcaggatatcacaggacaggatatttctgagcctcaatctgatacaacattatgggtccacaccatctaaagtaaagtagtttccaggtattttagcactaaaatcttaggtggagtatactttatgaagaatatttagtaacatataaaaaattatcttttcgtattgatacaataagctacagtatcagatttttctttacaagagtaatttttaaaaacctaataactgtttttagaaataaaattcattaaaaaacaataaaagggtataaattccagctattcttactacttaatacatggtagaatataaaccaccaaagaggacaattagccttctgtgttattatcatacaattgctaaggtgatatttgaacttggaatgtgcttacaggctggataacttttcagttattcccaagaagaactgatctaaaccacacataccttataggtgatttttgccagcaagtaacctacagtcaaatacatgtaggtctgccagaatgttgtttctttttgttttttttttttttgtttttttttgagatggagttttgctcttgttgcccaggctggattgcaatggcgtgatctcggctcactgcagcctctgcctcctgggttcaagtgattctcttgcctcagcctcctgagtagctgattacaggcacccgccccaagcctggctaattttttttgtatttttagtagagatgggttttcaccacgttggccaggctgatctggaactcctggcctcaagtgatccaccttccttggcctcccaaagtgctgggattacaagcgtgagccaccacgcccggctgaatgttgagtttcttgttaaccaatcctgcccaaagactttctgaaccatttttagaagccattaagttttttttaaaaaactagatgttaaagtataaaacttataccagaaaagtcttactaagaggagggactagaaaaaaaaaagtcaagccatcatctgaattttactacaataagtaattattggaatttctacatgaaaggcaattagaatgtatagttggttaatgaagaaatttaagagatacggagaagacactgcccatttaaaatgtatccttttaaaaccactgaacagagaaattcttaatacaattgagagttagttttaaagtagcatacatgtattacaggcaaattagaaatgttggcactacaaaggacctgtagaaatcatctatttactgagactttcattttagaaatgagagctttgagtactgaaattgtcagaacagaataagctattttaaattactgtatatttggttttaagtgaaacacaaatgtcttttacattcttttaagagttggaagggaggttaaattttttagaataataacatattctaattttttccagtgcatctgggggaggtgttgtagccattgacaacaaaatagaacaagcaatggtaagtaaaagtttacagttctcccatttcatagattgttggttgtatggaacacttagcttttgtcagttttagaaaacaaataagttatttaaaccaaagatgaccaaatcatgttttttgataatgagatttagttgaagatgctagaacgttgagaacttttagtctagaaatactatttaagtagatatttcttccatttgaatatctcacatttcatgcattatcattgataagggccattggtgagggggcatacatatttaaagacaatatgttccccagatatttcagcattgaaaatactttagagcgaaaaagagtattaaagcaaaaacagctggaggtctgattgaagtagactgtaagtaagctataagtaggccaggcacagtggattgtgtctgtaatcccagcacctgagctgaggtgggaggatcacttgaggccaggagtttgagaccaacttgggcaacatagcaagaccccgtctctacaaaaaaagttggtatttttgtttgttttgagatagtctcgctctgtcacccaggctgaagtacagtggcatgattttgggtcactgcaacctccacctcccaggttcaagtgattctcctgcctcagtctcctgagtagttgggagcacaggcacacaccaccacatctggctaatttttgtattcttagtagagacggggtttcaccatgttggccaaggtggtctcaaactcctgacctcaggtgatctacacgcctcagcctcccaaagtgctgggattaccggtgtgagaccttacaggactgttagtctcaaactatttttttaaaaataccaaaattttaaagtccaaaattacagatcactttaaagcagtactatgactagtttaacatcaaacagctttccgttggaatattgttcctttgttctctttatctaccattttaagcatgtgattttaaactttttttttttttaattctaagcttagttgacaatttaagaagctagtattttttggaaatcgtcccaaactttgaaaagaaaattctgggcttactgctctggttgggaactggattttttccaacccatcttccataggctcggtcaagataaagcagaaacattaaaagcaagagcaggaaaactagtataaaaacttagcaccaagtaggccagaaccagatagcaccacctttatcttttcactcttttgacattcctaattttgtttttcacaggatctggtgaaaagccatttgatgtatgcagtaagagaagaagtggaagttttaaaggaacaaataaaagaattagttgaaagaaactctttacttgaacgagaaaatgcactgttaaaatctctttcaagcaatgatcaattatcccaactcccaacccaacaggccaatcctggtagcacttctcaacagcaagcagtgatagcacagcctccgcagccaacgcaacctccacagcagccgaatgtctcctcagcataaagctttcttaagcctcattaagaaaaaaactgaaagcaatctatccttgtgtgccactggtgttctttccactttatacgaaagcaagtagccatgctttggttgtgtgtttggccttttcagtattagacaatcattctacaagagcttttcctctctctgagatgtcatgcagcgctgttgatgtccagttctatgtcatcagtacacaaggagaataatagatggggtttattaaagcgagcaaagtctgcattttacctggtgcgcatgagtggggtctttaagagttttggtggctctcccatgtttcctattacccatggatttaccctgagccttcctatcacattataaataacagttcatctaaagagccacttttctttctgattcagtaacatttgcctacataagttttcatttatttgtgttttatttattacagggctgctattttcataatgtacatgaacaatgtcacagaacttttttaatttttttgaataattataagtatcagtaaaggaagtgaaagacaggattgcatttaatagataaaacgtttaggcaataattgaacaaaagaatcctggcatatttctaacactaatggcaatttacttatggtatttattttcagtagtaaagacccagcttgaatgtaaattttgtatagtgtaagtatgaagaacatagtgcaactgtacaggtagtcaccagttattgtgatatgataaataattgggctattttgatgaagaaaactttgttcatttgtttctactttctaagagaaattgccacgattcctctgcttttcaacatttcgtatgacttttttttcgggtgggaataaaaagctgtgaaattgttcaacctactttgtaaccaaagaagcaaagctgtgtaatggagtttggtttttttttgttgtttttttttttttgtctttttttttttttataatgcacattctttatgtatttttatttagtgttttctcagtcacaattttctttactgtctagcatgatctgcatgacctataatctttgaaccactttcgtacctcatgtttttatccagcactcttattgtaatatgtactagtctgtgaacaatgtcaaataaaagagaacgaacaggtagtttggtggagctgagctagtgtacaatacactagttgtaaaaaaaaaaaaaaaaagtgagccatcttttgttcatttaaaatggtgttttgaatttcgtatgcagaaaacgttttgttacattgcagattttaatgtatttaataaatgcaacatgcagattaagtgcagtgtatactgagtatttaaattaaaatgtacatttcataaatacagtttcaaaagaaagcatcattttgtgtatactaacacattaagtgtatgtcagaaattgatgtataaatatatattttaacattttctgaaattaaactgcagttttgttgaaatatttggctctatatgtgttcaaaatttgactagatttgtattttcacagttcaaaatactccttaaagacctgttaataatgacttactgatagttcttaaattttcaaagtaaaacaatttaaagaatgcaaaaatagtgagcaatatttgtactcaatattcatattatgttagtgatacttaagtaggaaatccttgtctaccaaaacttttacttgaattcagaaaggtgcctgtagaaattaacatgcactgcatctgtagccagctagctaatcagagttaatgagaaccagtagttagttctccgtgttaaaagacttatttgaagtaaaaatttaatcagattagccacaaacaaacaaggcataaaattgggatgtacatgagattgccaaatattttctattctagttgtgctgcaagacattgaacaaaatgttaatgaataacattataaatcaaggaactaagtacataggcttgagtaagcaaccctaaggatgtgtagtaagattccaagtagagctgctacaggtgagatacttaatggaatgtgaaacttcactgttggactgttaaccgaaaaggtttgctggctgtgcccctccagtgctaactgtgacatgtgatatttaatacaggtggagaaaaactagtcttagaaatgggatttttgtgaaaatagattccattttgattctggggctggaaaaacacttcataaacaaagtaatagtctccaaggaaatgaataataaggtttaaaatggtaacagcagttattactacttttatattaagaaaaacagtagaaaaggagagaaaatatgggtagttcacagaagagataaatggcagtttctaaaggttcaacctctagtaacctaagaaatgcaaattaatgtttttggcgaattgtaataagtgtcctaagtagcaggacttaacatagaaagaaagacaggctttcctgtgtacttttagaaagtaatttggcagtatgtatctagagccttaaataataagctttccagtgtaacgacaggagaagatactcaactcatggtccattgttcaaaaatgcagaattattgtggtgtctgccctctgctttcccatcatcccctcccctcaaaatccaaactatccctactgtcaacccttcccccagctgattgtttaggatcttaagtaacttccaattcagctttggagatttagtctcctgctccaaatagttgtaaatattaactgattgagatcccaatttggaggcacagtcttacaggaatgccatctatctaattctgtcagtgtaatgcccatagagcaaggtcccacataagcttttctgttttaatttagccggtaaatcataagtagaaatttttctgatacggtaattgtctacaattcaaacctaactttccccaaataaaatttagtttgttccgatgtgatctcacagcttgccacaccaaaaacaaatagtaggggttaggaggcattaaataaacagtttccttaactcctgattgtccaaaatagctgaatttttccaattctatttataatatcctatgctaattagaagtattgagataacgttttataatcaagcctccagtgactggggatcacagctgccattattcacaagaattttcacaggtgaatgattatatttctccaagttgcaaactccagtaattcatggacctttttttttaaaaaaaaaagtcttaatagaaccagaatatctctgttcttgaaaatttatctttgcagaaccagaaatagctaattgtctggaaacaatttttaagatttgaagtcacatttttaaaagaagctttatggctcagtggcaagcactttgtgacatttctttaataatcctatgaaaaggacaaaacccagccctcaaaattgacaatttgaggacataataagccaactgataatgcagtgaggaatacttgttactatgtacagtcagggatggttttgtcagggtaggtttcctcaaaaacatgacacctgagtcttgaaggtcataagagccagagggaagggtgttccaagcacaagaaaagagaactcaatggcttaaaagtataaacaaggctcctagggcagccacagaattgcattggagacaggcaggcagtgacttccccactgacctagtattttggcatctattcagaaagcaagaatgatttattgaatggttttaagcaatgggatactatgctcaaattatgctggatgtgcacaattccagtggcagatgggaggtaggttagagtagctgaaactggaagctgagaaataatttaggagggatgacaatccggaaaataaatgaaagggcaaaattacataggcaattttgtgaaggtcatgaaggaagtttgtcttgggtctttctgtaccattttcctctccacaatgaacatcccattcccagtgtcaggtatcaggtgcctattttctttttttcttttttctttttttttttttttttgagacagagtcttgctgtgctcaggctggagtgcagtggcaagatctcggctcactgcaacctccgcctcccaggttcaagcgattctcctgcctcagcctcctgagtagctgggattacaggcgtgtgccaccatgccaggctaatttttgtatttttagtagagacagggtttcaccatgttggccaggttggtcttgaactcctgacctcaagtcatctcccccgcccgcctgggcctcccaaagtgttgggattacaggcgtgagccaccgcacccagctgcctattttcttgtccctccaaaaaaagattaaagagtcccaactcatacttgaaagtttgactcggtcttttccttccaacagttataaatctgtgaaatgaaagtctttgtttccttaaagggatttcaagaatttaacaaaagggttggggaatggaacctttgctgtcactatgcctgtctctcaattctaccctaaaggtaaactaaatggaatccttttatggtgactaggattaggatgttgattccaaagcctttccctaaaatctattccttgctccctggaaaggataatacaggttctggcccccactgtaggtactgacagcccaaggcagaataggttttgctaggctttagccttttattctttgacataggtcagtcctgcaggcttcttttttctaagtctcctgcctatccaaaaccagaccttttctcccacctccttctgcttcaagcctcttaataatccatatttctattttctagcaatagtaatagtttattatttagtgatgtatacttgcaccccatttactccttttcaatatttcaggatacatctttgtcctgtatttctgtaccagttcacagaatttctacagcaagatccctttaaatgtatggctttccttcataggttgcaaggattactttatacaagtgctactgtaactatatcttttgtggagtacaattggtatgacatgctgtgttcatagatgaaaatgctaagtgaggcactctgaagcaagttaaagttcacagacattcttgcttgcccaccacccccccgaaccccgccatggaatcatcaaataagaaaaataagacagattttcagattggtgatggcaaagtaagacgctggtattttgcactggcgcagtccatttagttgttgaatttgttcagcatacctggatggtgagtgagttagctttatttttcattctcagcagggaaactgatagactaggcagtttggggaattttcccattgtctactgtcatgggtccatagtatttaagtttacagactacaacattgtccacagaagccatatttatccccttggagggaagggaaaggtgtgctaacttagatcataaaaacaactgaattttaaaacaaggcaaatgccacagttcaacttctccataaaaaagttaagttcatctctccattcttttgcatgcctacaatatttccatataacaactgtaaaatactcttgcctgctgcaatccaaatgttatccggatcacagttcttgctgtcatttcacaggcatgcaatgtatctatagataggtcatatcatacctgaggaagatcagagacagcaagggaacattttccccacacttgagatggaaataataacaggtcagtggctaataaaaagaaacatgtatgactttgtaaaaccctaaaagtgatgttttcaagaaatttaggtttcttttttttattttataaaaaaaatgttgacatgcaatttaattctatttcaatttaggtgctgcaacctgtactggatgtttggggatagaaagatgaatgggacatgatttgtgtgctccaatgagctcagtccagtgtaagtgtaaaagttaaagtgccatattgtttattcagagtatatgttatagtttgtgaaccttatatcatttgttaaatgaaaggtttttataaatcaacagtaatattgccatcccatgtaaaaatcctttgatattgccaggaaacaactttaaatcaccagaaagctttaacatcaaataatacttttagaaggaggggaaaagccttccacctcgacatcgagcctatgaagtattccctaaaaaagaggaactaatctgagaaaagtttacacatttttaatactctaagttgtagataatgaaattgatttaaatcaaagttaactagaataggattcatgtgtcatgaattatattgtctattgtctcataagcaacaagtgacacttattatcttggctgacaaaatcagctaccatttaatgaaccaagttaagaataactcaggtgactgataccaaaaataaatctctaatacagctgagaatccagaaacacaaataatatgttgagtaagtaataaaagtgacatttcaaattagtaaggaaaaaatggattattcaacaaatagtatgggatagcataacaatttagaagaaatataaagttagatctttcacaaaaattaattctagctagactagcagttagtcttctactttttggttactcccttttagaaattggaagctatgaagctatataccctgtccatttgaaaatgcacataagcaaagaactttacaaataggttataaagagaagctcaatctcagcaaaataagggaagtgcacattaaaacacaagaaaccatctcagatccaactaatatttagcgtgcatacaaatcaaaagctggaaagggtgtggaaaaacaggaatacattgctagtgagcatacaaattggcacagcctcttttaaagacaattgtgtatcacccattaaattttaaaagtcacataccctgtgacctaacaattccaacttttaatgtcctaaagaaacatacatgtgttcacaagatagcctgtacaatgatgtcaattgcacctttgcttgtacagtagacccccttatctgcattttcactttttgaggtttcagtcatccaaggtcaaccacaatacaaaaatattaaatggaaaattccagaaacgaacataagttttaaacttcaaacctttctgcatagtataataaaaatctctcactatccctctccatcctgcctgggacaggaatcatccctttgtccagtgtatccacaatgtatacactcattatatacccattttataatgcccattagtcatttctattatcagatcataaaaaaacatagtacatagagggtttggtattattcatggtttcaggcattcagtgagggtcttggaaaatatcctccatgatgggggagctactgtaatactatgaaattggaaaaaccaaaatactcatcaagaggatggactatggtacacatgatgaagtattaagtatcaatgaaaaagagagagtcctacatgtccggcatggaaggatctccaggagacaatgttaaaagtttgggggaaaaattgaaagacaatacctgtaatacatatgatactagtgatgttaaatcacatcacacacacacacacacacacacacacacacaaatactgtatagtgtacttctacaagtacatatttgtgtattatatagagagaaggtctggaaggatactaaccaaactgtcaacagtagtttggtagcgtgcattagctttaactgtaatgtttgatgtttttgaatatgcatttatgtattgtttgtgtaatgacaaattaataaattagaaataaaataaaataatgtgttttcttcttgtctgctgctaatgtttccccctggtacctggggtctcatcatgttcagcatctttcctccccaggaatatcttccccccctacctgtttcttctacttcgccttctcccatggctttttcacatcagtatttatacaggctcaataaataactggccaataaatgagtagaccacctcccctaactgaaaatatgttcccttcacttgctttttcagctccttcctcttcctttccactttttcctcttccacgtacagcttatcacaaacgcagtctggctttagctcccattgtgccactgaaactgttcttgtcaaggtcattgatgatcactttgttgctaattctatcccatatcttattgaactgctttactcctaatttctctttatgatcatttcattactctagtagttttctatctcttcattttctaacttcactttttttttataaagagtttcccttataaaaagtatatagttgaattttcttttctgaaccaggcaacacttcattccatgaaatagaataagtgttcccaatttttttcttttatagagatgaagtcttgctatgttgcccaggctggctttgaactcctaggctcaaacaatcctcccacctcagtctcccaagtagctgggactacaggtatccaccactgtttctggcttgaatttttaatttcttaacccaatctgtcttttgatagaaaaatttaatccatgtctatttcatcagtggcatatttggatgtatttctgccatcttatttcatgttttctccttaaaatgctttctagacaccccacccccgcaccggccactgccttgccacacacacaccctttttcccttttcttggctttcattcagttgtttcttattcatttttgatccctcttttggttgggaagttatacattccagatacattcttccagtggttaccttacaattttgtttatcattttgttgtggatttttcaaccatatacaacagtgaactgtataatgaactcccatgtacttatcacctagcttaaacaattatctactcatggccaatcttgcattatttatactcccactcatttcccctccccaggatactcaagaatgtcaccccccagaagggagttccaagaggaggaggaaaatgtgaaccccaggacggaattctagggggaggaggagaaagggctctgggacctacatatggggcttaaagtgaagagcctaggaaacttggggtgagagaatgccaatacttagaaagaatccatgatcctctggattattttgaaggaaatccaagatatcatagactttatccatatatatttcagcgtatacctctaaaggacaaggattttttaaagaaaaattataactaaaataccatcaccccacctcaaaatgaacaattccttaatattactaaaaatctactcaatgtccacatttccctgattatcataaatttcttatggtgtatttgtttgaatgtgggtcaaaataaggtccatacactgcaattggttggcattcctctaaagtctcttttaatatgtgggctccccatacctctcttttcatcttgaaattcttcaagaatctcagttatttgccccatagttttttctgaagtctgagttttcctaattgcattcttatagaatcctctgtccctgtatttcctaaattagttctagaagtttaatcagatttatattttgtcaagattaattcataagtggtggtatatacttccatcatataatgtctgtctctattttgtgatgttggaagcatggataatcattacctagacccattagcctattaattctattatcccttctcactcattagcgaaatacttctctaaagagagacttgcccttaccaactattcagctaccctgtggtacagtttgtataagaaagggagagacttagttctttccttttatttcccagttttcaaaataatgagttgagtacctacaaaggaataaaaataaataaggcatgattagggaagacttactctgatattttattctgggaagaaggaaaagagaatgcagtgagttgatttaggatgctatgactcaggtgttagtagagagaagccaggaaaaagcccccaaaaagttgataacaggaaatggcgacctgaagatttgtctgtttactgctgagtctggaagcaacttctaagtgaagagtaccttgagggaataggggtgggaagcccatgtctgggcagagaaagggctagttcagaagaagcaactgcaggtaagaaaagcaggtcggttagcccacggattcagagagtgaaaagttacagaaatgagcagtggatttttctgggtttactttctgccacacagagactagacatactatccttacaatctgaccatgaaccaggaagtttactaagaaaggctgcatggggtaggtaacatttagcacatgcaacaatactttttattttattttatttgagatggagttttgctcttgtcgcccaggctagagtgcaatggcgcgatctccgctcacagcaacctccacctcccgggttcaagccattctcctgtctcagcctccctggtagctgggattacaggcatgcgccaccatgccaggctaattttttgtatttttgtagagacagagtttcaccatgttggtcaggctggtctcaaactcctaacctcaggtgatccacccaccttggcctcccaaagtgctaggattaccggcgtgagccaccgcgcccggccaacatgcaacaatacttctaagcaaggcgatacagatcagcaactctggtgccgatgtgttctatttcctttggtatctgtgtcttgattcttcacgcagaccaattttgttatcatcttaatggtctttcccataaggaacccactaagaggtttcagtgttgggacattagcttaagaacctaggtagtcagcacgagaacctaggtctgtgggactctcctattaatgactcctcttacctaccattctccagccagcgttgtctcctgttcttctcccctccccctattccatcctgccccgagtagtctattcgtgctaaagcattcactgagaaaaactgtaaagggagagtcccttctcagaaacaccagcttcttttaaaatggaacttttgaagacctccctgttctgttctctggagagagtgaacaagtagagacttggcaatagctgtggaaacaccgccagcctcttgcttccagcaaccttgagttccaaacctgtgagtcttagttttatattcactgacttcagcttcctgaacccatcccagttcagcattaggtaatggctgtgatgacagctgactcatctggtaatgcagctttcctggaggcttcctctgctcagataatcacactctgggagggaaaaaaggttacaacaatcttctaccccaggatactcaagaatgtcatcccccagaagggagttctacgaggaggaggagaatgtcagccccaggaggggaggtccagcgggaggaggagaagaggctctgggccctacatagggggtttaaagtgaagagcctaggaaacttggggtgagaaggtgccagtacttagagacagaaactgagtggtataaaatggaatgagaatcccctcattgccctttgacagctgagaaacttcaaactgggccccgtttgagggtaagttctgcgagagtagagacttctacttatttattcacaattgtattcctggtaactagtacggtgatgtattgcttgacagaaatacattctgagaaatgt

SEQ ID NO: 427 - DNA, 5169 bp, Homo sapiens
cccagcatccctggcgcggccatttcagccccatcttggcccagcggagggagctgcagccgccgcttcagcagtttgaatttcagtttcttcggggtttaggaattgggcgcaccgaggaggagccggagaagccaccaccgctacctcacacagccggggcgcctccggtcccgtgccagcggtctgccgccgccgcccctctctgagagaagccgcgaggggaggccgagaccgccgtcgccgcccgcccgcaggggtggttccccctgtaaggggaggaccgagccggctttcccctcccccagagcgggtttccgcctgaggcagtcgacatgtccctggggctgagctccggctagagccggggagggagggccgcctgcccgcgccacagccccaccgcccgcccgcggaccttcagccagctccggcccgcggctcccggctgaattaggcatctccgactccggactcgccgctccttccctcagtcagagagcccagcgctgacgccggcaccggcctgaggagcccgagcggggcagcaccgcccctcacgccgccgccaccgcctcctcctcctcctcttcgccctcccactcccacccccagccaaggcctgctgaccgcgccgagcgccgagctggactgaccacggctgcccggagacgagagaggaagcagccggcccgcccctgggttcgcgctctcgccgcctctgagggaattgaattgaggcgccgcggctgcgagagctaaaaaggaaggaggagccgccgcgggactgagacgggggcagagccgaagagaccgacacagagaaggaaacgaggaggaggatgtctcaccgggcggccagcgcctggatcagcccgtgactcttaacagcggcgggcctcagaccccagcgcagactcggactttgtctttgggggcccgtgctctgccctccccggtttccgacaggacccagaggagccggcgtgcctctctgccctccagccttcttcaccatgtccaagatgccggccaagaagaagagctgcttccagatcaccagtgtcaccacggcccaggtggccactagcatcaccgaggacaccgagagcttggacgacccggacgagtcacgcacagaggacgtctcctccgagattttcgacgtctctcgggccacggattatggccctgaggaggtctgcgagcgcagctcttccgaagagacgcttaacaatgttggggatgcggagactcccgggacccgtctccccaaacctcctcctagatgggcagctggcagcggcggctgctgctcccgccaacggaggaggagtcgtttcggcccggagcgtgtctggggcgctcgccagtaccctggcggcggctgccacttcggcccccgcccccggagcacccggcggcccccagctcgcgggctcatccgccgggccagtgactgcagccccatctcagcctcccaccacatgtagttcccgttttcgcgtgatcaagctggaccacgggagcggagagccctatagacgcggccgatggacgtgtatggaatactatgagagggattcagacagcagcgtcctgactagatccggggattgcattagacacagcagtacttttgaccagactgcggagcgggacagcggcctgggcgccaccggagggtcggtggtggtagtagtggcctccatgcagggggcgcacgggcccgagtcgggaactgacagctccttgactgctgtgtcacagctacccccgtcggagaaaatgagccagcccactccggcccagccgcagagttttagcgttgggcagccacagccgccgccgccacccgtaggtggggctgtggctcaaagctcggctccgctgccgccgttcccgggagccgcgaccgggccgcagccaatgatggcagccgcgcagcccagccagccccagggagcggggcccgggggacagactctgccgccgacgaatgtaaccctggcgcagccggctatgtccctgcctccgcagccgggccctgcagtgggcgcccccgcggcgcagcagccccagcagttcgcgtatcctcagcctcagataccgcccggacatttgctgcccgtccagccctccggccagagtgagtacctgcagcagcacgtggccggcctgcagccgccaagccccgcgcagccctcgtccaccggcgccgcagcgagccccgccacggcggccacccttcccgtgggcaccggccagaatgcttcctcggtgggcgcgcagctcatgggcgcgtcttcccagcccagcgaagccatggccccccggacgggaccagcgcaaggcgggcaggtcgcgccttgtcagccgactggagtgcccccggctactgtgggaggcgtggtgcagccgtgcctcggtcctgccggggctgggcagccccagtccgtgcctccgccgcagatgggtggcagtggtccgctgtcagccgtacctggtggccctcacgccgtggtgcccggagttccaaacgtgcctgcagccgtgcccgctccaagcgtgcctagtgtgtctaccacttctgttactatgccaaatgtacccgcgcctctggcccagtcgcaacagctgagcagccatacgccagtcagcaggagcagcagcataatccagcatgttgggctgcccttagcgccaggcacacacagcgcaccaacaagtctaccacagtctgacctaagccagtttcaaactcagacccagcctttagtcgggcaagtcgacgatactagaagaaaatcagaacccctacctcaaccaccactttctctcattgctgaaaataagcctgttgtgaagccgcctgttgcagattccctggcaaacccccttcagttaacacctatgaacagtctggccacctctgtattcagcatagctattcctgttgatggtgatgaagacaggaatccttcaactgctttctaccaagcgttccatttgaacacgttaaaggaatcaaagagcctctgggatagaattttttttagaattcagcatcggaggaggaatgtgacataataatgatcgaaagccgaaagtttaaaagttgtgatgccctcacatggttggagggttattctagcttctaaggactgaatgttgtccacaagagtgtcatcaggtcataaattgtgcatctgggggaggtgttgtagccattgacaacaaaatagaacaagcaatggatctggtgaaaagccatttgatgtatgcagtaagagaagaagtggaagttttaaaggaacaaataaaagaattagttgaaagaaactctttacttgaacgagaaaatgcactgttaaaatctctttcaagcaatgatcaattatcccaactcccaacccaacaggccaatcctggtagcacttctcaacagcaagcagtgatagcacagcctccgcagccaacgcaacctccacagcagccgaatgtctcctcagcataaagctttcttaagcctcattaagaaaaaaactgaaagcaatctatccttgtgtgccactggtgttctttccactttatacgaaagcaagtagccatgctttggttgtgtgtttggccttttcagtattagacaatcattctacaagagcttttcctctctctgagatgtcatgcagcgctgttgatgtccagttctatgtcatcagtacacaaggagaataatagatggggtttattaaagcgagcaaagtctgcattttacctggtgcgcatgagtggggtctttaagagttttggtggctctcccatgtttcctattacccatggatttaccctgagccttcctatcacattataaataacagttcatctaaagagccacttttctttctgattcagtaacatttgcctacataagttttcatttatttgtgttttatttattacagggctgctattttcataatgtacatgaacaatgtcacagaacttttttaatttttttgaataattataagtatcagtaaaggaagtgaaagacaggattgcatttaatagataaaacgtttaggcaataattgaacaaaagaatcctggcatatttctaacactaatggcaatttacttatggtatttattttcagtagtaaagacccagcttgaatgtaaattttgtatagtgtaagtatgaagaacatagtgcaactgtacaggtagtcaccagttattgtgatatgataaataattgggctattttgatgaagaaaactttgttcatttgtttctactttctaagagaaattgccacgattcctctgcttttcaacatttcgtatgacttttttttcgggtgggaataaaaagctgtgaaattgttcaacctactttgtaaccaaagaagcaaagctgtgtaatggagtttggtttttttttgttgtttttttttttttgtctttttttttttttataatgcacattctttatgtatttttatttagtgttttctcagtcacaattttctttactgtctagcatgatctgcatgacctataatctttgaaccactttcgtacctcatgtttttatccagcactcttattgtaatatgtactagtctgtgaacaatgtcaaataaaagagaacgaacaggtagtttggtggagctgagctagtgtacaatacactagttgtaaaaaaaaaaaaaaaaagtgagccatcttttgttcatttaaaatggtgttttgaatttcgtatgcagaaaacgttttgttacattgcagattttaatgtatttaataaatgcaacatgcagattaagtgcagtgtatactgagtatttaaattaaaatgtacatttcataaatacagtttcaaaagaaagcatcattttgtgtatactaacacattaagtgtatgtcagaaattgatgtataaatatatattttaacattttctgaaattaaactgcagttttgttgaaatatttggctctatatgtgttcaaaatttgactagatttgtattttcacagttcaaaatactccttaaagacctgttaataatgacttactgatagttcttaaattttcaaagtaaaacaatttaaagaatgcaaaaatagtgagcaatatttgtactcaatattcatattat

SEQ ID NO: 428 - protein, 630 aa, Homo sapiens
MALRRSASAALPKRRLTMLGMRRLPGPVSPNLLLDGQLAAAAAAPANGGGVVSARSVSGASTLAAAATSAPAPGAPGGPQLAGSSAGPVTAAPSQPPTTCSSRFRVIKLDHGSGEPYRRGRWTCMEYYERDSDSSVLTRSGDCIRHSSTFDQTAERDSGLGATGGSVVVVVASMQGAHGPESGTDSSLTAVSQLPPSEKMSQPTPAQPQSFSVGQPQPPPPPVGGAVAQSSAPLPPFPGAATGPQPMMAAAQPSQPQGAGPGGQTLPPTNVTLAQPAMSLPPQPGPAVGAPAAQQPQQFAYPQPQIPPGHLLPVQPSGQSEYLQQHVAGLQPPSPAQPSSTGAADATAATLPVGTGQNASSVGAQLMGASSQPSEAMAPRTGPAQGGQVAPCQPTGVPPATVGGVVQPCLGPAGAGQPQSVPPPQMGGSGPLSAVPGGPHAVVPGVPNVPAAVPAPSVPSVSTTSVTMPNVPAPLAQSQQLSSHTPVSRSSSIIQHVGLPLAPGTHSAPTSLPQSDLSQFQTQTQPLVGQVDDTRRKSEPLPQPPLSLIAENKPVVKPPVADSLANPLQLTPMNSLATSVFSIAIPVDGDEDRNPSTAFYQAFHLNTLKESKSLWDRIFFRIQHRRRNVT

SEQ ID NO: 429 - DNA, 1570 bp, Homo sapiens
agctgagcagccatacgccagtcagcaggagcagcagcataatccagcatgttgggctgcccttagcgccaggcacacacagcgcaccaacaagtctaccacagtctgacctaagccagtttcaaactcagacccagcctttagtcgggcaagtcgacgatactagaagaaaatcagaacccctacctcaaccaccactttctctcattgctgaaaataagcctgttgtgaagccgcctgttgcagattccctggcaaacccccttcagttaacacctatgaacagtctggccacctctgtattcagcatagctattcctgttgatggtgatgaagacagtgcatctgggggaggtgttgtagccattgacaacaaaatagaacaagcaatggatctggtgaaaagccatttgatgtatgcagtaagagaagaagtggaagttttaaaggaacaaataaaagaattagttgaaagaaactctttacttgaacgagaaaatgcactgttaaaatctctttcaagcaatgatcaattatcccaactcccaacccaacaggccaatcctggtagcacttctcaacagcaagcagtgatagcacagcctccgcagccaacgcaacctccacagcagccgaatgtctcctcagcataaagctttcttaagcctcattaagaaaaaaactgaaagcaatctatccttgtgtgccactggtgttctttccactttatacgaaagcaagtagccatgctttggttgtgtgtttggccttttcagtattagacaatcattctacaagagcttttcctctctctgagatgtcatgcagcgctgttgatgtccagttctatgtcatcagtacacaaggagaataatagatggggtttattaaagcgagcaaagtctgcattttacctggtgcgcatgagtggggtctttaagagttttggtggctctcccatgtttcctattacccatggatttaccctgagccttcctatcacattataaataacagttcatctaaagagccacttttctttctgattcagtaacatttgcctacataagttttcatttatttgtgttttatttattacagggctgctattttcataatgtacatgaacaatgtcacagaacttttttaatttttttgaataattataagtatcagtaaaggaagtgaaagacaggattgcatttaatagataaaacgtttaggcaataattgaacaaaagaatcctggcatatttctaacactaatggcaatttacttatggtatttattttcagtagtaaagacccagcttgaatgtaaattttgtatagtgtaagtatgaagaacatagtgcaactgtacaggtagtcaccagttattgtgatatgataaataattgggctattttgatgaagaaaactttgttcatttgtttctactttctaagagaaattgccacgattcctctgcttttcaacatttcgtatgacttttttttcgggtgggaataaaaagctgtgaaattgttcaacctactttgtaaccaaagaagcaaagctgtgtaatgga

SEQ ID NO: 430 - protein, 216 aa, Homo sapiens
LSSHTPVSRSSSIIQHVGLPLAPGTHSAPTSLPQSDLSQFQTQTQPLVGQVDDTRRKSEPLPQPPLSLIAENKPVVKPPVADSLANPLQLTPMNSLATSVFSIAIPVDGDEDSASGGGVVAIDNKIEQAMDLVKSHLMYAVREEVEVLKEQIKELVERNSLLERENALLKSLSSNDQLSQLPTQQANPGSTSQQQAVIAQPPQPTQPPQQPNVSSA

SEQ ID NO: 431 - DNA, 5012 bp, Homo sapiens
cccagcatccctggcgcggccatttcagccccatcttggcccagcggagggagctgcagccgccgcttcagcagtttgaatttcagtttcttcggggtttaggaattgggcgcaccgaggaggagccggagaagccaccaccgctacctcacacagccggggcgcctccggtcccgtgccagcggtctgccgccgccgcccctctctgagagaagccgcgaggggaggccgagaccgccgtcgccgcccgcccgcaggggtggttccccctgtaaggggaggaccgagccggctttcccctcccccagagcgggtttccgcctgaggcagtcgacatgtccctggggctgagctccggctagagccggggagggagggccgcctgcccgcgccacagccccaccgcccgcccgcggaccttcagccagctccggcccgcggctcccggctgaattaggcatctccgactccggactcgccgctccttccctcagtcagagagcccagcgctgacgccggcaccggcctgaggagcccgagcggggcagcaccgcccctcacgccgccgccaccgcctcctcctcctcctcttcgccctcccactcccacccccagccaaggcctgctgaccgcgccgagcgccgagctggactgaccacggctgcccggagacgagagaggaagcagccggcccgcccctgggttcgcgctctcgccgcctctgagggaattgaattgaggcgccgcggctgcgagagctaaaaaggaaggaggagccgccgcgggactgagacgggggcagagccgaagagaccgacacagagaaggaaacgaggaggaggatgtctcaccgggcggccagcgcctggatcagcccgtgactcttaacagcggcgggcctcagaccccagcgcagactcggactttgtctttgggggcccgtgctctgccctccccggtttccgacaggacccagaggagccggcgtgcctctctgccctccagccttcttcaccatgtccaagatgccggccaagaagaagagctgcttccagatcaccagtgtcaccacggcccaggtggccactagcatcaccgaggacaccgagagcttggacgacccggacgagtcacgcacagaggacgtctcctccgagattttcgacgtctctcgggccacggattatggccctgaggaggtctgcgagcgcagctcttccgaagagacgcttaacaatgttggggatgcggagactcccgggacccgtctccccaaacctcctcctagatgggcagctggcagcggcggctgctgctcccgccaacggaggaggagtcgtttcggcccggagcgtgtctggggcgctcgccagtaccctggcggcggctgccacttcggcccccgcccccggagcacccggcggcccccagctcgcgggctcatccgccgggccagtgactgcagccccatctcagcctcccaccacatgtagttcccgttttcgcgtgatcaagctggaccacgggagcggagagccctatagacgcggccgatggacgtgtatggaatactatgagagggattcagacagcagcgtcctgactagatccggggattgcattagacacagcagtacttttgaccagactgcggagcgggacagcggcctgggcgccaccggagggtcggtggtggtagtagtggcctccatgcagggggcgcacgggcccgagtcgggaactgacagctccttgactgctgtgtcacagctacccccgtcggagaaaatgagccagcccactccggcccagccgcagagttttagcgttgggcagccacagccgccgccgccacccgtaggtggggctgtggctcaaagctcggctccgctgccgccgttcccgggagccgcgaccgggccgcagccaatgatggcagccgcgcagcccagccagccccagggagcggggcccgggggacagactctgccgccgacgaatgtaaccctggcgcagccggctatgtccctgcctccgcagccgggccctgcagtgggcgcccccgcggcgcagcagccccagcagttcgcgtatcctcagcctcagataccgcccggacatttgctgcccgtccagccctccggccagagtgagtacctgcagcagcacgtggccggcctgcagccgccaagccccgcgcagccctcgtccaccggcgccgcagcgagccccgccacggcggccacccttcccgtgggcaccggccagaatgcttcctcggtgggcgcgcagctcatgggcgcgtcttcccagcccagcgaagccatggccccccggacgggaccagcgcaaggcgggcaggtcgcgccttgtcagccgactggagtgcccccggctactgtgggaggcgtggtgcagccgtgcctcggtcctgccggggctgggcagccccagtccgtgcctccgccgcagatgggtggcagtggtccgctgtcagccgtacctggtggccctcacgccgtggtgcccggagttccaaacgtgcctgcagccgtgcccgctccaagcgtgcctagtgtgtctaccacttctgttactatgccaaatgtacccgcgcctctggcccagtcgcaacagctgagcagccatacgccagtcagcaggagcagcagcataatccagcatgttgggctgcccttagcgccaggcacacacagcgcaccaacaagtctaccacagtctgacctaagccagtttcaaactcagacccagcctttagtcgggcaagtcgacgatactagaagaaaatcagaacccctacctcaaccaccactttctctcattgctgaaaataagcctgttgtgaagccgcctgttgcagattccctggcaaacccccttcagttaacacctatgaacagtctggccacctctgtattcagcatagctattcctgttgatggtgatgaagacaggaatccttcaactgctttctaccaagcgttccatttgaacacgttaaaggaatcaaagagcctctgggatagtgcatctgggggaggtgttgtagccattgacaacaaaatagaacaagcaatggatctggtgaaaagccatttgatgtatgcagtaagagaagaagtggaagttttaaaggaacaaataaaagaattagttgaaagaaactctttacttgaacgagaaaatgcactgttaaaatctctttcaagcaatgatcaattatcccaactcccaacccaacaggccaatcctggtagcacttctcaacagcaagcagtgatagcacagcctccgcagccaacgcaacctccacagcagccgaatgtctcctcagcataaagctttcttaagcctcattaagaaaaaaactgaaagcaatctatccttgtgtgccactggtgttctttccactttatacgaaagcaagtagccatgctttggttgtgtgtttggccttttcagtattagacaatcattctacaagagcttttcctctctctgagatgtcatgcagcgctgttgatgtccagttctatgtcatcagtacacaaggagaataatagatggggtttattaaagcgagcaaagtctgcattttacctggtgcgcatgagtggggtctttaagagttttggtggctctcccatgtttcctattacccatggatttaccctgagccttcctatcacattataaataacagttcatctaaagagccacttttctttctgattcagtaacatttgcctacataagttttcatttatttgtgttttatttattacagggctgctattttcataatgtacatgaacaatgtcacagaacttttttaatttttttgaataattataagtatcagtaaaggaagtgaaagacaggattgcatttaatagataaaacgtttaggcaataattgaacaaaagaatcctggcatatttctaacactaatggcaatttacttatggtatttattttcagtagtaaagacccagcttgaatgtaaattttgtatagtgtaagtatgaagaacatagtgcaactgtacaggtagtcaccagttattgtgatatgataaataattgggctattttgatgaagaaaactttgttcatttgtttctactttctaagagaaattgccacgattcctctgcttttcaacatttcgtatgacttttttttcgggtgggaataaaaagctgtgaaattgttcaacctactttgtaaccaaagaagcaaagctgtgtaatggagtttggtttttttttgttgtttttttttttttgtctttttttttttttataatgcacattctttatgtatttttatttagtgttttctcagtcacaattttctttactgtctagcatgatctgcatgacctataatctttgaaccactttcgtacctcatgtttttatccagcactcttattgtaatatgtactagtctgtgaacaatgtcaaataaaagagaacgaacaggtagtttggtggagctgagctagtgtacaatacactagttgtaaaaaaaaaaaaaaaaagtgagccatcttttgttcatttaaaatggtgttttgaatttcgtatgcagaaaacgttttgttacattgcagattttaatgtatttaataaatgcaacatgcagattaagtgcagtgtatactgagtatttaaattaaaatgtacatttcataaatacagtttcaaaagaaagcatcattttgtgtatactaacacattaagtgtatgtcagaaattgatgtataaatatatattttaacattttctgaaattaaactgcagttttgttgaaatatttggctctatatgtgttcaaaatttgactagatttgtattttcacagttcaaaatactccttaaagacctgttaataatgacttactgatagttcttaaattttcaaagtaaaacaatttaaagaatgcaaaaatagtgagcaatatttgtactcaatattcatattat

SEQ ID NO: 432 - protein, 720 aa, Homo sapiens
MALRRSASAALPKRRLTMLGMRRLPGPVSPNLLLDGQLAAAAAAPANGGGVVSARSVSGASTLAAAATSAPAPGAPGGPQLAGSSAGPVTAAPSQPPTTCSSRFRVIKLDHGSGEPYRRGRWTCMEYYERDSDSSVLTRSGDCIRHSSTFDQTAERDSGLGATGGSVVVVVASMQGAHGPESGTDSSLTAVSQLPPSEKMSQPTPAQPQSFSVGQPQPPPPPVGGAVAQSSAPLPPFPGAATGPQPMMAAAQPSQPQGAGPGGQTLPPTNVTLAQPAMSLPPQPGPAVGAPAAQQPQQFAYPQPQIPPGHLLPVQPSGQSEYLQQHVAGLQPPSPAQPSSTGAADATAATLPVGTGQNASSVGAQLMGASSQPSEAMAPRTGPAQGGQVAPCQPTGVPPATVGGVVQPCLGPAGAGQPQSVPPPQMGGSGPLSAVPGGPHAVVPGVPNVPAAVPAPSVPSVSTTSVTMPNVPAPLAQSQQLSSHTPVSRSSSIIQHVGLPLAPGTHSAPTSLPQSDLSQFQTQTQPLVGQVDDTRRKSEPLPQPPLSLIAENKPVVKPPVADSLANPLQLTPMNSLATSVFSIAIPVDGDEDRNPSTAFYQAFHLNTLKESKSLWDSASGGGVVAIDNKIEQAMDLVKSHLMYAVREEVEVLKEQIKELVERNSLLERENALLKSLSSNDQLSQLPTQQANPGSTSQQQAVIAQPPQPTQPPQQPNVSSA

SEQ ID NO: 433 - DNA, 55836 bp, Mus musculus
  misc_feature (1)...(55836): n = A,T,C or G
ctctgcctcccgagtgctgggattaaaggtgtgtgccaccaggcccggcttcatcatagtctttcatgttctctgaagagaggcctgttttctgaggtaaacaccccacgacaggcatgcttcccacacagcaagcaggccagagatgaaggagcagatggttaggggatgactcgacattcctgcaaacaaaaccttatccagcaaacacaggcgctcttgttaacttctgagtctgagaccagctagacatgtcacaggaactaactccaccccaaatcaggaggacagaggcagcaaaagcatctctagatactcctggaactcgctgttgggacctctctggatgcgctatttggaatttcacaagagtaatccgtgtgcccatgagcctcgggcagagcaacctttgctcctttttaaccatctaaactccaactgtaggtaatctgtgagaccaagtctaagccccagttggccaataaagattcactttcaatacctggcacactgagggactgcaagtcaataatgacctaggattgactacaggtaccctttacagaggataaaagccattttctgctggctgctggctcaatacttaagataaacacctgccttgaaagtccacagaagtctattcaatggctatgtgtgggggtatagccccgtaacctcagcacacaggagggagcctgaaagactgcaagttcaagttctgcctgggacattcaggaggactctcacaaaaacaagggctgggaatgcacttcacaggtaggcaagcatttgcctagctggtgtgaggtcttggagttggttcctaacaaagtccctcaaagtgtccagcaatagcaaatatggtatcatttctcttgtgctgcctcctagcaggtctcacaggctgcttcccttctgcagtgagagaccactgtttgctggttgtgtagcagctgctatgagtgcagggaatactggtctgtgtgcagatgcacagttagcctttgccgtcagacgcgtgcctgtcagtctacgctatgttcccttctaagtgaaaacccgtgcttcacacacacacacacacacacacacacacacacacacacacaggaaaacatgaaagcaacaggcgctgaggctgcaaagggcacggcatcagactaagggaaagctctggacagcaaccatggagacttagcttccagacctatcttcaatggtaatttgttgggggtacctttgggcaaattaccaaacttctctggaactcattttcattgataaacaaactggggtggctggactacagctataaagtccctgccaacccttgagaccgccgctcaccttgtaatggaaagattctttgcactgcttacattggtgtattctggttttacagtggttgatcatgtggctttccaagtctttgctgttctcagctatgtgctcacagataggacactggtaaggctgcctctgccgatggacacgcaggtgctgcttgatgtagcccctgttgccacttgagtagttgcacaggcggcatcggtagggccgctcggcatctgggatgtactccaccacgttggaccccaacaaactcccatcgctgttgggctgacactgggcattgtcctgcaactctttcaaaatgtcatcatctgatgcattctggtctgtcctttctctcagtttttctattacggtaagaagggacatactgatgcctgtcttaacttgcccatctgacaattcctgccttccctctgggagagctaccacagtggaattgctttggttaaaacttgttactccatctgtagaattcttaagaggagacatgattttttttgagtatgttgccaatggaccactgacctgcctttgtccagtgtctggatctaaaaggtttatgtccccatagtgcccaaggctggctcttgttagttcagcagctcttatcggcatggtgacaagggcttctgcagctaaggagtgcagcctgagagactcagaatttgtccttctccgtcctggtggggcattctcatcaggagccaggcccttacttagctcactgtctttcttctctgcactgctccagccgatgatcaaccccccaatatcaacagtacatttatcagcatggtacatatttcctgctcctacacacccagtctgggcttcggaggggctcgggctcttcccctcttccatttcggcattaatgaggaaatgttttggtgggagggtttcttcagcacttggcaaacgttccacaatgacattcacgtgaccttttttgtttgggctactgctaatgattttctgtgctgaagatagcaaactatcagcaaagagattctcctcggaatcagacatcacctccagcatttcttcctcgttagcgtccagcgtgactgcctggtttaggtgtactccctcctctgtgctttgttctaaaggagatgaagacggtgggtcagagctgcaaatctgtacttgtacagatggcccattgtggatgctcagctcgctgtccccaatagcaatgacaactgcatcaaccccaccaggtgcagcagacatagaagaagccagaaggccaaggggctcattttcattctcaaagattgggtaggagcagttaacttcccctgcatgtttccaagcatgtgtctttaacatccgctgctggccgcaggtgtagctacagaataagcaccggtacatgccatactgttcatatgcataccacttcctccgacccgactctgccatggctgcactctggacagcatgggtctgtggactgcccatgttcactgggatgtctaccatggtctcactctttctttctgtggctccctgaccggaggggctggaccgggcctggctactggcactgttctcgtgctcactcaccacgtgcgcttcgagctcctgctggctcctggaggtggcgtggcactccgagcacatgagcatcacgtcatgctgctgcccatgctgcttgacgtgctctttcagcacagaaaaggatggtgacaggaacttacaaaggctacactggtaggacatagccttcccatcatttgaagcaagagtggaacttgcctgtgacatctcggttttcctaaccccagcagcaggggactcagtggctttagctggaatctcacagttctctagcttttcaagagagtttgctgtctcacttggacgtgggcgctttttcccaatcagtagacatttttgtgacttctcatgccccactatcttgcttagcttctggataacgtggaccaatggatctgctttagcttttctttgttggtcaacttctgaggaagggctgaggactccttcagcagttaacacagcctccggttctccaatctcttgcaccaacatggcaatgctgctgctttcttccatatctagagacagtgcacagcagagagcatgggttatgggataatgtcaactctggtgtctgactgaaatgtttaaatatcttctaagttgggaggttcctatcaatgcacccaactgtccctaatagacttaaacagctcagaattcctttttgaaacggtctcctagagacagataaagaccctgttccttgggtaagactttaacaccttatcctgtcacccagcctccttgagattctagaactaatgtcccttgaatcccttgcaattctagaactaaagagacatgactctttgtttaaagaaacccttgagattctagaactaaagagacatgattctttgtttaaagaaacagccatccttggggcctgtggagtcacctcgagctactggaaagcatcagtctgtgaagccaacatgatttcatgtaactctggataaactatttcttatgccaaattttaactgtagataacgaaaaatcacacttctctgctcaaatttttgaaattctgaaaatatattcacatcctactataaggaatactgaattttgggaagtactttgcaaatgaaactaaataagagcaatgatctacttcctcctttctttcctttggtttatggtccgccagataaaccacaaactctgctgtggcttcctagaggtcgcatcagtggtcagatgttccccatccccatccgtgtctctctcctgagcaggggatgggcttaggaagcaaacgctgtcattctggttctggctcagtgccagacagaggccgggaagtgtttcctgcaggcgcacagaataatgcagcaaggtacacagcgcttaggagcaacatcaccctccctctggaggcctcagaatctcctttacacttcctggcagccctttctcttcagacatttcctttgacttaaattgagattattttgttgacttggaccgaagttttaagtttaggctcttttccagcaacaagttttgtttttccacattttaggtacattctggaacctagctcacaacattcaataaatgccaacaagattttcagcaccacaagttacagaccaaaaactaggaatcattcttaaactccagttttgcactcttctctctacagggctgaatcctgcatgagggctttagttcccagccaggagcatacctacggcactgcaccaggcaggctcctagggaactcctcgcctgcacttgggcttgcccctttccgaagtctctggccacactgttgcctttttgtcctatgtgccactctctccatcttgagttgtctttatctaggtccatgtcagataaaatgcacatgttttattcctagctaaaaatcagcttttttctcctaggggtagcctgtaacaaccacctcatgaaggggaatattccagaaccataataacatagccatctcagctctaaaaatccctctaagaacatttgtgtctttttgttgtgtctcagaaggaacaaatctttttagattgagacaccaaagtttgagttgctacaggagagactgataaaggacagtgtagttcttcagggggaaacaatgaccaaaaaaccctctttgtggcatcttaaaacacatctcactgtctgaagactccagttttaggggctagggagatggcttcatggataaagcgcttgctgcatgtacgagggcctgaggttggattcccagaactcatgtgaaaactgtactgggcattgtagcacacacctataaccccagcactggggatggagtcagggagtcaggtggagtgaggtggaatcagcctggggattggctggtgagctactttagcagaaacagtgactctttagcagaaaagacgactcatgcaagtagatgcacagacacacttgaagcaaaacaagaacccagtgggttttggccaagggaagctgtggttcttcatgtgactgctgattcccctgtggggtcataactgaaggacttctgttgccattcagttcaactgttaacaatatattagttacataataaaagtaacaaattcacagcattttcagtttcttggccagatacaacgtatagtattgtaaatacaagatctcccttcctgtgggtgtaagagccacacaggctagctgataacttggtgaacatttaatgtttgttcaacagacttcacacctagtgttacaaaggtgactcctgattcctctcttctacttaatgatccaacaggaggaagacagagcagtgcaaattgctccccatggatagttcagtgtgcttcttaaaaagaaagtgaagtcaagaggaggagttcatcttagcccaagaaaacggctaatacaaaagactctgacacacactcactttcagagctgcgtgtgctcaggcattaagagctaatggcaacttgcagcagatgctccaatttccctagaacatttatgtaagtatctcattttagaggctgcatacatttggggataagtacagtaaggcagctatcaaaccgatatgacaacataaaacgcatcaagaagcacctgaaaaaaccagtttaggtctgcaggcaaaaccaacaagcaagcaaaaactcattaaaaggaaagtctgttaaataaaaggtcacaaacagccactgtacacaagagaggaggtcactaaaaccaactacgtctttaatttcctatttttttccttatggcattcatgcagcctatgtgtactatatacattgtacatataaatatgtagatatttatatataatttaatatgtcaagtgagctaataaaattcatttgaactagagatgaaaaagagtcagcatacagtactagtgactcaaatcacaccacggatcacgataatctgaattccatccttggacttaagagaccgaagcaaacacagctgaaagaaatgatgctgggggacaaaagtagggtaggactgtggaagaaggtgatagagggagaagtaattctgtcagtgaaggtggcatgattacctcttcattatactcttctttctacttgtacaaatgactaaagtttttcataataaaaacaaaccaaatacacccaccctcaacatcaccatgtgcaaggcacacagaaagtaggtaggccaggcttttacactgacatagttactcgaaggtgaacatagataagcacatggagaagctagagaagactaatgttggctttccaacgctgtggtaacatgaaggctaagtatatatggccaaatcctaagtaagagaaggctcctctgcgcagagagcaagcacaaggcttctggaaaaggcagtatatccactggtccctgtagggttagattgttcaaaacttactttatttagggttcttaaactctgcaatcttccttctaacccatcaaccagaagtaggggaaaaagaaggttactaggaaaagagagttgtggacctgtttagaagtagtcccttggggtaattccaatctttattgtcggataccaacagtccagttaaatagcaaacaccaaccatgaatcagcagtagtggcacaatccagcagaaacagcaaggctcagccaaattggcaccagttagcagaagcggccagaatcagccggaataccatgagaagttctttggtgtgtttctctctacaaagtgaacaccagcaaagaagtacgtggtactgcaatgcaagcgcgttttctcagtgtttgtggggctctatttatattcttcctaaatatcatgagtcctctcaagtgtttatgttcagtaaaacgtcacatgccctctcacaagacagcgtccagaaaaacatcactcgatgtaaccgaactgttaaagaaaccagaaagttccatcttagtccccagcatctaggggtgtggagacatcaccacctgtgctctctgggccccttgtggccttctctctatgggactctgcttcctagtcctctggcagggcactgcaaatggagaggaacacaggtgagaaggaacagggcagtcaatgtcctggtttctgcttctaggtcaccctggattggttgctttttgttctttagtttttttttcccccgccccatgtggatgctgggatttgaactcaggaccttcggaagagcagtcggtgctcttaaccactgagccatctctccagccccggattggttgcttcttaacaggtcagttcttcctggatggctgctctctacaaatctatttctggctttggcacttctgttctcctgatgctgcttctcccactaacaccatcactctgtggcctgcgaatagaaggccaatacctggtaatattatctttgtaaatataacctccttcagttatcctgatttgagagctatttgcttctctgctgtaaatgcaaggctaagagtgacaagaaaggttgagaaatgagaaagcctactctaaaactctaacacgaacatcttacaataggaattagcatgctctctaaggtagtgaacagataaaaatcactgcactgcaaggttcaccaagacacaagcctagaaatgttagccacgagggagatagcttttttgtaaccactagatcagaagacccagtcagaacaagtgaattaggtactctcctaaaccagcagtgttctacagtctttcataccgagtccctgacaacagtcatccacagggaaaagcttgtaattaatgtctttcccaagaaaagtgaacaaattcagttgtctttattttcttgtaatttgctatttggtgtatttgtgtatgtaattagttccttttagttatagcagtatggctacatgtagaactgagcgaaatgattcatgtgggcttgaagaaaggctctaattttctgggtatatacaaagagagaaagacgatataaagaaatcttcttttagagtatgcatttcgtttttccaactaagtaaataaacaaacaaaaccccacaccaaaacaacagaagcgatggccaatgaatttcacactctttcagacatctgttttagccaaaagaaggtagggttcctctgttctctgaagtgccctggctgcatgatccaggcgagtcactctttgttttagcttcttctggtgtgaaatgtgaggggaaagctggatgaacttttagagatggaatcacaaactgcctattaaaagtaacctaaaagctagttttacttcacatcttacaaaggtcagttacaatttatttaaaatcttctcagctcaatgtaataatagcaactgagagaaaaactggagtataaatacagaagtatactggtttcatagtatagagtgtcttacctgcacctagcctgggacaatattttgactttgcagctacaattaaaacacagtcgtagctaacatcaagtagtgttcagcttcattgtaatttatgaaacacacatgccaaacatagcgctgaagaccacctgtcctggagctgcaaacccagaattaggcctgcgtccatttcctgtaatattcctgtaattcctggtggccaagcccttctttggacacaaagtgtcaaggaacacctctgaggctcacagacgtgaaacagtgcctggcttcagaactcaaaccacgctttccctagtataccgatttccctttccatgctcaaggtgagcatgatcaagtaacagcaccggatggatgctaggcagcagcaaacagcttcgtttgctcagagttctgtgggtccagtcacagtggtggcggtttataaataaggcatctcagtgagatgtaagtgacttacccaaggttacatggctgttagtggcagagccagtgtctttccaatcaatttctgaaacagatagtctcctggatcgatattcacaatccagctgtggccaagaaggaaataaacaccatcaaacacgtctctcccttggcgggcgaaacacagtaacttatttcggcagtgaagaaacttccaatacttaacattgaaaagaaatttcggaaagctgttcatgcaatgtaattgtgtgaggcaaatttacataatttacttaacaagtagaggattttgcagaagctaaaacaaatcagcctggaaaacttctaacaattgtatattttaaacctccccctccatgtaagtaattcactcagcaaactactgcttttactgacataattttctaaccaatatggaataataaatgacatattgctattctaactttaaccgaaattacagcctaaggggtgattatgtaaattagtcaaacacagtgggcagaagagtaccatgaaaagatgcgacaacgtggcttgacctatatattctccaaagcagtttcctgccctggtcctcctttttttttttttttttggctactgttttcctattgttgctttaaagtaggcttattcggttcccttagaaagtaacttagcgattacagttaagtaaaattagtacaccgctagggcatcctccgagtttccagagttaccatggtaaaggaatgaagggtcaaactttctctttttaatcaatatagcaatccatacacagaatcagaccagtagagtagaaagtacaaactcagacagaaaagggggtaaatccagtaattgccttgggccatgtagactgaaagcaaattcctgtccactgtcagcaacctttggtgggggtggctgcctggacctaattaatcacccaggcctcggactccaaacaacgatcgggatgccccaggtctggaaaggtgggcactttcaccaatggtctcagcgatctctggaaagatcagtcaatcccagaggatgtgtacgtgtgggaggccacgattgctatttttcgtttgcgctggcatttcctacaccacgcagtgcttaaaggacgggggattaaagaaacttaagctccatcctggctggcctaagcgctttcacgtctccagaaggcaaaggcgcttcagcgggacctggggagcaacgggacccccacccccagcggcacggcgggcccggggtctccacaggcccgacagagggacgacagtacacacagggccctggagctcaggctcgggtgcgtggcagtgccgcgggcgtcaccggcgaggaggaagcgggcgtcaccagcgaggccgcacatggccggcggcgctcaagcggaggggcggcccggggcgcggtacctgcggtcgggcggcgggctgctgctcctgcgagcctcctttggccggccgggaccccaccgtaccctcgccctcgtccgcctcgctcccgactcctttccctctctttccccctttttgccccttcctcggccgtggctccaagatggcggcgccgagacagatcacgtgagcggcgagccggtcaggtgagcctggaggcgcnnnnnnnnnnnnnnnnnnnnnnnnnnnnnnnnnnnnnnnnnnnnnnnnnnnnnnnnnnnnnnnnnnnnnnnnnnnnnnnnnnnnnnnnnnnnnnnnnnnnnnnnnnnnnnnnnnnnnnnnnnnnnnnnnnnnnnnnnnnnnnnnnnnnnnnnnnnnnnnnnnnnnnnnnnnnnnnnnnnnnnnnnnnnnnnnnnnnnnnnnnnnnnnnnnnnnnnnnnnnnnnnnnnnnnnnnnnnnnnnnnnnnnnnnnnnnnnnnnnnnnnnnnnnnnnnnnnnnnnnnnnnnnnnnnnnnnnnnnnnnnnnnnnnnnnnnnnnnnnnnnnnnnnnnnnnnnnnnnnnnnnnnnnnnnnnnnnnnnnnnnnnnnnnnnnnnnnggcagatgctgtggccatccaggtcctgtcagagctggtgttggtctagaactcagttgatatccactgtggcctcaacctgctggggcattcttcatcccctcatttaccccatcgttctttacatccttgtgcttgtgaatctggctggacttttttttttttttttttttttttttaaagtttatcgagggctggagcgatggctggagtgatggctggagcgagggttggagcgatggctccgtggttgctcttatagaggacacaggtttggtttccagcactcatacagtggctcacaaccatgtgtaactccacttccagggactcagaagctctggccttcttctgacctccacagactccagacacacacatggtgctcaggtatacagataagtaagccattcacacacacaaaatattatctacgtatttatttattgttatttgtggagacttgtggtcagaggagaattttcaggagtctgttctttccttccatggtatgggttctgatattgaactcaaaccttcagacttggcagcgagtacctttacccattgaaccacatacctcctagataaatgctcttccactgagctattgagtttcctgaaacaactcatcctggcttctaattccttatgtagttagcccaggcagacatttgaagttgtgaacctcctgcctcagccctccagggtagcttgggagagtagatgtgtctccaccataccaggctctaattggagctattatttttttcaggcatcgtatgctgaaaaatgtagaggtcctaaccgtatgtctgatgagaggcagtgctggctctgggtcaaaaatactttcttttttttttttatgtttaaaatttaaaaaagcatttattgattcgtgtgtggaagacagaggacaattttctggagttggttcactttttctcccgtgtaggtcccaagggttgaactcgggttgcagctttgatagaaagttcttttaccaactgaaccttcttgcggtccttgaaagatttttcaggagttgtaaggtctgacttggtgagcttgcggtaataactccgagcgagccgtcatgtttgtcgtttggatctgtttccgtgaagtatctgctctgctgtaacaaaccctgttgggtcctgtgctaataccatgaatacaaactgagagaagcaatctcacccagctttcaacccaagaataagccggcaggtaggggctagcaggaatggcagagccacgagcttgggtctggattcaatgggtgggcgtggccagaggaaggactttagggaggatcgtagtgatagcgccaggctggccttgttaggtgagataccttttggatgtttcctggtatatttagaacccacttcaagcaggttgggttttgagtcgtcaaaatacatacgaaaaagtaatggtttaggtacggcagccatcttatttgctgtgtctctggataaaagtttaccagctggggggttacagagatgactgaatggttaagagtggattctgctcttgcagaagacgtattggttctcagcacccatgccaggcagctcacaccccctcagctcatggatgggcttcttctcgctacagatgacgcagatatagaccagattagaccagactagagatagataaagccaggtttattagatgccgttctcaggtgggatccacgagtcgggtcgcaaagaaccgggcggggcaaatcgtgcatccgggctagggtgaggtagttttatagactgtaggcgaagggtgatgatatgtcagcagtaagctgggtttgtgcccaagagctgagcgtactggggactgaggggactggggtggctggcagcatcagaggaggaggttgcaacagcctgggcacttggagcccttcctttgtttgtgggtggggttgcgaggaaggagggcagatggggtttcctagcttgtgcaagggtaagcaggggtccatcctaacactcccaatcagtcgtctctccagctccgggggtcaggggggagtgaggtgtgtgggggaggtctggcatctctggattccatgagtgtcagcattcattttcacatacccgccctgccccaccccacaaataaaagcaaatctttgaaaacaggtcaccagcctttgggtgttggaaaaccagcagagttagaattctctctggtggctcacagactccttcaccatttgggccaaatagtgaagaaatgaaaatcaagggctgagggattcttttcagttacaagttagaggcgaagtatgggggaaggaggaattagcatggaaggctagaaggagaaagacattagggtcagccccagataggaaagcatgaaaggaggaaccaggatcaaatctgacaatgttttcccttccccttgttgtatgtgaaagtgtgctgaacaacccgcgggtagcaagccagtaagcagcactcctccatggcctctgatttagctattgtccttgcttccctggtgataatgctgtaacctgtaagccaaataaacccattgctctccaagctggtttgtgtacacacttatgtacatatacctacacatacacattcatgcacatgtgtatatatatctgagttcatatgtgcacgtgcacacacatatgtgcgcacacatacacacacacacttttgtagtgctgtggctggactccaggactccacacctcctagccaagttctttgccactgagttacacccccaggtccccttccctttttattttgagatacgctttcacagagttacccaggctggtcttgaactcacttctgtagccccgggttagcttgaatctcccatttttacatctctatctcccatttcccatctctctcttctgtgtactgatgtcaaaggcctgcaccactagttttgcttaatatgacttttttttttttttttttttagaaaaagttgctctccagaaaggttgtagtaaacgttttttaaagtcaaaggaatgcaaagacccagtcgttgttccattaaacttgtggacaatgaactctcagcacctcgcaccagacacagaatggttttatcatgatttaattaagcagccatagcaagatttcatgttccagataggacacttacttatgcaattatctagcccctgttcaatgggatctgattctgttctcagatgagagatgaccctgataaccaagtccctgtctcacatacctcctcattctcctttggggtccttaattagttgataaggttaaaggtttcacttctgccagtatcctgggcttgtatcatgtacgtgaccatggagtctgatgcaactgaaaccagcacagtgtttacatctcagtaacacagaaagtgcagtaagtttcaagttggtaaccggcaggaaactgagtgagccgccaggactggacctgaggaagtcttgtttctgagtgagcgacatgccccagaggtgctatagccaagccggaagacctggactacacagtggagggagacagaaatcattcctgaaagttgttctctgacctctacacgcacaactacacacacacacacacacacacacacacacacacttgaataaatgccagtcttttaagctatgatacctctgaaggacacttcgtcttagctttcttgtggattagtcatggaagtcttctgattagcgccgagaattgaatgaggtaaatgacctgtataaaaaaagattttttttttctttttgagtcagattttccctggcctagagccacatatgttcctgcttcagcctcccaagtgctgtgattacagacatttgccactacactggatggaagtaatatagcttttgttttatgatcttttaaaaacaagtattttgtctcagaaaatgaaagattgggccccaagaaatgtctcttggttaagagcactggctgctagtcgagaggacctaggttagattcccagcacctacatggaggctcacaattgcctagaagtctagttctggggatctggtgtctctgagagtacctggcatgggtgaagtactcttatatacatgcagataaaatccaaaaatttaaagtaaaaataaaaataacccttaagaattttttttttaaaaagaaatattgctgtaatctcatccaatcagcaggcagaggcaggaggttcacaatgaggttgaaggcagcttgtcttaaaaagtaaaggaggggctgtgactctaactgtggcacagagcccttgcctgctggtgactcaggtgatagcagatgctggcaaggatgtggagaaagaggacactttgcaaggtggtacagtcactctggaagtcagtgtggtggttcctcagaaaattggacagagtattacctgaggacctagctataccactcctgggcatatacctaaaagattctccaacatataacaagaacacatgttcccctatgttcatagcagccttatttatagtagtcagaagctagaaagaacccagatgccctttaatagaggaatgaatacagaaaatgtggtatatttacacaatggagtactactaagctattaaaaacaatgaattcctgaaattcttacacaaatgactggacctagaaaatatcatcctgagtgaggtaacccaatcacaaaagaacacacacggaatgcattcaatgattagtggatattagcacaaaagcactgaatacccaagatacaattcacagacaacatgagcacaggaagaaggaagaccaaagtttgggtgtttcggtccttcttagaaggagaacaaaatactcataggagcaaatatggagacagtgcagagcagagacagaaggaaaggccatccagagactgccccactggggattcatctcagatagtcaccaaactccgacactattgtggatgctaaaaaatgcttgctgaaaggagcctgatatggctgtctcatgagaggccctgccagagcctgacaaatacagagtcaattgctcgcagccaaccattgctctgagttcggggtccccaatggaggagttagagaaaggactgaagaagctgaaggggtttgcaactccataggaagaacaacaatatcaatcagccagagaacccagggctcccagggactaagccatcaacaaaggagtacacatggctccagctgcatatgtagcagaggatggccttgtcaggcatcaatgggaggagaagtccttggtcctatgaaggctggatagatgccccagtgtaggggaatcaagggtgggggaggtgggagtgggtgggtgggtgggtgggtgaaaggaacaccctcatagaagcaagggaaggtgagatgggatagaaggtttccaggaggagaggaaaccgggtaaggggataacccttgaaatgtaaataaatttataaataaataaataaataaataaataaataaataagctatctaccagttaataactgcccaactgtgctagggaccaggcatcaaccactcaatgtacatagggtccaatcacaacataacagaactgcccccttcacttccccatgctctccctcatcatgaggccttcctcagtctgtactgagcagtctcaactctaagaagttcataactgacctgcaacacacctgcagtgctcccgaaagaggtcaagatcaacaggacaaaaacggcagannnnnnnnnnnnnnnnnnnnnnnnnnnnnnnnnnnnnnnnnnnnnnnnnnnnnnnnnnnnnnnnnnnnnnnnnnnnnnnnnnnnnnnnnnnnnnnnnnnnnnnnnnnnnnnnnnnnnnnnnnnnnnnnnnnnnnnnnnnnnnnnnnnnnnnnnnnnnnnnnnnnnnnnnnnnnnnnnnnnnnnnnnnnnnnnnnnnnnnnnnnnnnnnnnnnnnnnnnnnnnnnnnnnnnnnnnnnnnnnnnnnnnnnnnnnnnnnnnnnnnnnnnnnnnnnnnnnnnnnnnnnnnnnnnnnnnnnnnnnnnnnnnnnnnnnnnnnnnnnnnnnnnnnnnnnnnnnnnnnnnnnnnnnnnnnnnnnnnnnnnnnnnnnnnnnnnnnnnnnnnnnnnnnnnnnnnnnnnnnnnnnnnnnnnnnnnnnnnnnnnnnnnnnnnnnnnnnnnnnnnnnnnnnnnnnnnnnnnnnnnnnnnnnnnnnnnnnnnnnnnnnnnnnnnnnnnnnnnnnnnnnnnnnnnnnnnnnnnnnnnnnnnnnnnnnnnnnnnnnnnnnnnnnnnnnnnnnnnnnnnnnnnnnnnnnnnnnnnnnnnnnnnnnnnnnnnnnnnnnnnnnnnnnnnnnnnnnnnnnnnnnnnnnnnnnnnnnnnncaaggcaactcctataaggacaacatttaactggggctggcttgtaggttcagaggttcagtccattatcatcaagacaggaaacatggcactgtctagacaggcatgtccctggaggagatgagagttctacatctttattcaaaggggcccaggagaagactgtcctcaagtagctaggaggagggtctcaaagcccatccccatagtgacacactttctccaacaaggccacacctcctccaacaaggatggactgcctaaaagtgccactccctgggctacacttattcaaatcaccacaactcttgaaaaaaaaaacccaaagatttacttatttttaaattatgtgtatgagtgttttgcctgctgtgtgtctatgcaccacatgcatgcctggtgcctccagaggccagaggagggtctctgatttactggaattagagttatagatggtgtgagcctccaggtaggtgctgggaacagaacctgggtcctctgcaaaatagccagtgttcttaaccactgagccatctctccagcctcttcgtttattccctatgaggttcttaataagacaggagcatgtgcagaagtcatctacagccaggaagaggaggaggaaagcagagacccatcaccacacctggtgcttgctccagctgacaggggtctggcttccgtttcagctctactgtttggatggaattcacttagggaaatctccctgaggatcccagtcataataagtggagaggctgtgccatggaggctgaggtggaatttagtctacagctctccttgttggaggttctgtttcaatggtctggtgtaagggcatgaatttagggagtgagaatggcctagccggacaatgccgtgggttctattcctagcactgaaaaaagcagaggaaagtacatgggtggggtgggagacgaggaagaggagaagaatcatcgtcgtcgtcgtcgtcgtcatcatcatcattatccatggtagtgacatctagtggcctatcttggttgcacagtcaagccaaggagcactccagtgggaagtgagccctttcccttgtccaactacaacccagggtgtgaccttgggtccctgaatcagtctaagagctgagtttctggcagtgattctccgaatgtgtgacggtgtgtggtggggatccaggaaaccacagcagcaggcagggagtggaagaggagtgggggatgcttctgaggatgacaggaggctccttgcagactgcatgtgccatagactcccggctgcggcaaaaggaggcccatcagggctgcacgctggagcagggagcttgcttcagccagactgtctctctgcctcaatgcgaactggttattggcaatttttaagcaattttcagtcgtctctgtcaataaagccactctcttctctgcaaggggaatgaaaatgagattttgaggtctccaaaaggactgtctccttttgccactttatctgactgggagccaggtaggagcccaactgagtgggggtggtagctatttgctatgccccaaaccctgttgacaggtaatagcacctgcttcccgggagggttgtaatcggatactgctaaattcttccctgagaagggctctttccttagagcagagacctttattgatgagagcagcacgggaagaaaatgaaaagctggaggtgaagaaagacactatagggagaggtaactgcctatcacaccaaggaagactagctgaggggtaatcctggacttcaaaatatgtcatttgttattttgacagctcctcttgatggactaggaggagccagtggcaacggtgacagcagccattttgccagcatgaagttctaattcttgcttcttttggtgattaggaaagctggtgtggtggcagatgtcagtattcctgcctcttagagggagctgaagtggaggatggtacgtttgaggccaactggggctacattatgagaccctgacttaaaataaagaagacatcaagtccataatcaagccaggtggtatgaacctgtaatcccagatactcagaaggctgagacaggaggattgcaaattcaaggccaacttggataacttagtgagacttttatcttaaaaatttaaacaaacaaacaactcaaaaaactaccttagtggggaagaaaggggctgggggctgggaatagagttcagcagcagagtgtttgcttcagagttgggggtccaggttccttctccagtattgaaaccaaactaaaccaaggagctagaaccacaaaacaaacaaataaccagagatagcaagtaggctttaggccctcagtttttctttcttcatgtacggtgataaagcaagcatggagaatattggaaaaggcatggaaatgcacattagtgtccgaggaaagtccagggcccagtttccctgccttccctggccttctggtaagtgctgacccgggtaggcgggtcctgctgcaatgtgtattgagctgagcatggcatactcagcaccaggcatgtggacaccttcaggcttctctgaggaggtgagcaggctcctgtgacactcaccttgctgacctgcctttctccttcagctccagtgacgttcacagaatcaccttgcagagattgccctgtgatcaagcgcttggtagcaagaagcctccaaaccaggtgatcattccagggactggagagatggctcagttgttaagggcacttgctgctcttccagaaggctcaggttagattctctgcacccacatagtggctcacaaccatctgtaacaccagccccagtggactgcatgccctcttctgccctccatggaccgggcatccacacggtgcacagacaatacatgctggcaagatacccacactgtcttagggtttctattcctgcacaaaaccaagaagcaagttggggaggaaagggtttattcggcttacacttccatactgctgttcatcaccaaaggaagtcaggactggaatttaagcaggtcagaaagcaggagctgatgcagaagccatggagggatgttctttactgacttgcctcacctggcttgctcagcctgctctcttatagaaccaagactaccagcccagagatggccccacccacaaggggcctttcccccttgatcactaattgagaaaatgccttagagttggatctcatggaggcatttcctcaactgaagctcctttctctgtgataactccagctgtgtcaagttgacacaaaactagccagtacacacacacttaagataaaattaaaagtatgaaccatctgggtgtgtgtgtgtgaagacaaaggaccggcatgaaggcaggtgtgatatgctgcagatcaagtgcccagatgctggagagttctccgactggcatggagggctcagtgcagggacagggagccagctggaacggcatcatggagttgtggctgaaccaggtggaaaccatctcatgagggcttcgcaggtggaggctgtgtgcctggggctctgccatgcttcttcacacatttgtgtgtgagctgttccgtctcgagtcacaggtgctgttgctgcctccgcatctgtctaccctggtggtggtggtgggggagtggttccctctcagctccaggagcctgtcagtcgtgttcattgatatttcctctggctggcagcagagtcttgaatgcagctatagtcggcgatcgaaagagagagtgatttcgcctaagcacacctgctcctgggcgtgggtttagctagaggaggaactcaacagcagtcttttggagctgggtgtggtggtacgtgtctgctatgctagtaggcagaggactgggacgggaggtttgcagagtttgagggcagcctaggttccaaagtgagaccctgtcttaatgaactaatacctacctcaaagaaagtatttgggaggagagaaaataaagttgacatctacttagcaaccttggtgtcagtcttagtgatggctcgggagttctaagagtctagcctgtgaaatgggttttactcttagtttcagaatcttctagcacgtcttagctgtgagacttagtatattacttaatgtcttagccaggattccattgctgtgaagagacaccatgaccatggcaactcttataaagcacagcatgtaactggggctggcttacaggttcagagattcagtccattatcatcatggtgggaagcatgaccggatccaggcagacatggtgctatagaagaagctgaagttctgcatcttgattcgaaggcacccagaaggagactgtttttcgcaggcagctaggaggaggctcccttctacactgggtggagtttgagcacagaagcatcaaagtccacccccacagtgacttacctgctccaacaaggccacttcctaatagtgacacttcccatgggccaagcacattcaagtcaccacacttaatctctgtcctttattttatcatatcatggggataatgatactcaaagcactgctaaaaagtttaaagctggactggagagatggctcagcaattcaaagcactggctgtttctctagaagactgggattcaattcctagtactcacatggcagtctgctaccgtctacaactgcagttccatgggatcctccaacaccatgtcctggcctccttgggtacgtatgcacatggtgtgcccacccgtttatgcaggcagaatacccatacaccctaaaaagtttaaacaatttaatatataggaggtactgacatgactgatgggcagtgatcaataaatagtacaattgcaaaagattcacagaagggtgacccagagtgaaaggacaccatgagggagtccatgagcttttggtcactgattggaagtggagttgagagatggccagccccttggctcctttagcatgtcctggatgggaagtgttagtgtgtggtacacaccagtgacagacagtcgcagagcagacatcaaaggacacaaaggagaggagacgtgggcggagtcacccagccattctgtcctcagctgagagttgtagcgtgaactttggagccaagtcacatatgaccacccggggctcggcctatttttcctaagtatggatttttttggcaactgaactcccctaacaccctgccatttagatacattttggttaagaagtccagaagcctttggacttggctcttggtgttgaaagcgaatagaatttgcatgatttaagaggcttacccagatccacaccgctctctcttcagatttaaatgttcaaaaggctccaaatttgatatttcagtggcaacaatgacatctaggggctggtttctccaggtttcacccgagatgtctgtcctctgtttggagaagtgagcgcactaacacattcacgacacacagaatgttggctcagagcacaggaacttggtaggtggccagggtgacactcagggatcagtgaaagaaagtggtggtggcctcagctatcccctaagaacacccactacttcctttcttctaggacagcacactccatggtgcctacttttttcatttcccttcgatctgcagtcagctgcatggcaccctttgtattctgtttggttcaagtccactctgacagatggaaggccccatcttccctgtgtggaaaggggctgagactcaggttctatagccttctctgtgtgtgtgttcattcttttaggagctgtagggcatgctttggaagtccatatagtctcttctccattgtgtggtactgaccagcagattcattatcagcccatgggttgttgtcagtaagtcagtcagctaatagcatctactgaacactttctggatacactgtatatatatggttgttgtttgcagtgttgggccttgaacccagggccttgtacatgctcatcaagtactctattgccgagctgtgcctttggccctgtccttttgctttttaagaatcaagttcttccaagtggaagtgtgatcaacttctccactgtgtggtgctgatcttcagattcattaccatcctgaggttggctgtcaataagtcagtcagctaatagcatccactgagtactttctggatacactgtgtatgcctgtatgtgagtgtgtgtgtatgtccccatcctaatgtttaggtgtgagtaaggaaggcctggaaggccacgcacataggtccaattcacaagaaaacatatagtttatttgaagtgttccaaacaggggctaaggagatggctcactagttaaaagcactggctgctcttccagaggatgcaggttcaattcccagcacccacatggcagctcacaactgtctgcaactccaattctagggcatccgactctttctggcctccatgtgtactgtacacatggagtacacaagtaggcaaaacactcgtacacaaaggaaaaatgagtaaaaattcaaaaaaaatatgaaaaagtattccaagcatgcatattaataagaaataaggtattcatgaaagcatctgtgagagtgttggaaaatgcacaaatattcagatgctgtttaaggttcctctcagcaggcaaagtttgtgatttttgtgcagattaaaattagcaccctgctctactgatgcatagtaatattggcatccgcacacgaaacacagcttccatattgtctttctctgtgttagttaaaggggcaatgcaaactatagtccagctccttgggtccctgaaccctcggtggtggtggcctcacatgtctctctcagggtgtgttccctgaatgccacctcctctgatttccttcttagatttgttttatctttaagttatgtgtatatgtgtgtgtctgtgtgggggcatgtgtatgtgtgagtgcaggtgcctgtggaggccacaagagggtgtcagatactcacctagagcttggattacatgtggctgtgagctgcctgatgtgggtgctgggaacggaagggcctccagaagagctgtaagtgttcttaggagccatctccccagccctctttttctgattaactacggaatcctttgcattttaacccttgatattgccctttccttgtggtttcctagtctgttttccagtttcctactgcagcaaccagaacatatggatctgacactcagaaaaccattgatttaacctatgggatatgtgcgttagcttattttaagctttctattactgttgtaaacacctgagatcaactcaagtaaagcttggttcatggtcacttggtcctgttgctttgggcctgtggccaagcaggacatcatggtagaagcatgtgacaaggcagagctgtttgcctgtggtgactgagagaaacaagaagaggagcttgtcagcctagtacctgtcttgaggacatgctgttacccccttcttcccactgcgtcccacccagctcctaagtctcctaacagcaccgaggtcctgtgaccaagcctttactatgtaggcctttggaggacaggatttccaaattaaagcattagcctgtcagtcttttcctttttggaggagcctgagaatctccaagtgacatccttcaaggtccagcctgatgtttctggtgctggccagcctcatctccatcatgtctgtccatcctcatagaagtgtgttttggctttccagatgtttcactcccttgtcccccagtgtgcttcgctcagtctttgggtcttaaccgaacaactattttttcaggggggccttccttgtcctttctgactaggttcaatcccataacccactcttcaggtcttaggcctcatagctatagcttctgtgtgtcttactcaatcagtgtcaacccctttccatacactgctgatgtgaggtctgggaatggtgttccatcacagcaatagtaaccctaactaagacagcgggcctcagtgctgtgtacggaaaattccagtatcttgagtcaccatgttcatcacagcaagaagatgaaaaataaagggggtacttgatacagcccattcgcagtatcacaagtaaggaatgttcatgtctgttactagagaattcttgtagtctagacccttggcagatagtttacgaagtggggtttgactttccacagctttggattggaaagccacattcaactctctcttgaaagactctaaaccattatctacctcactgacttcaatacaagtacaattttggtgctttgtctgtaaagaagaaattaccaagtgatctcctcacttggtacatatttatgtgtctctctgtgtatgccacatgagtgcagtgcctgaggaggccagaggagggcatcagatcccctgtttccagagttacaggtggtggcaatccaccaggcatgcatgaatgctgggaagaagcagttcatgttcttaactactggactatctctttagctctcctcccaaaggtacgcttttatatgtatatttaaaatattttatttttataggatttcttcattttattttatgtgagtggacatttgcatgtatgtgcacatagtcttgaactcatgatccttctgcctcacgtcctcctgagtgctgagatgacaggtatgtgccaccacacttggctttcaacaaatactcacctaatgtgtggagtgtgtgtgtaggtcagaagacaactctctggagctggttcatttcttccactctatgggacctggggattgaacccaagtcatcagacctccatactaacacctcgacccactgagccatcggattgggccttaataatgctttttgagtgttggtaggtgctgtgtatgacacttacagtccagcaatggaaagaacagagtgaatgtctgctctcatggatctgagagtcttaccagagaaagagaaagaggtcagtgaacagacagatcaatgcatagtacaacttcagtgctaagaaatgggtcgaaggtacaggagggctgggtggggtagcccacacctttaaacatttgagaggcagaggcagggagatatctgtgagtttaacgccagcctggtctacatagtaatttctaggatagccagggctacatagagagaccctataaagtacagaatggagtgttcaggggagactaccttgaggtagaccagaaggatgaaatccggtgataagttttctagactcgggatgagcagtgggtagagcctgagccgagtatgttggagaaaatggccattgtgggttagaaagcaaaggaggaaggggttttatttatggctgttggtgggatccagagagcggttctgcttttgcctcccttgcgttttcaaaggatggtctagtagggactgcatgcaaatccttgagctctcgcctaagcagcaccaagctcttgctgtcttcctcaagctggggccatgtcaagtgatgcccctttctctcctccccgcccccatcagccccaccttcaggactgggaatctggagcaaactctgtgagaccagcaaagagctcaggagcaaatgggattttaaagttgttagggcattttggcattcagtcccccaagatgagcaaagtgtcttgtctggtaattgcaattaatggccctgctattcaagcatatccgtcaataaatctcctctaataaccgattgggcacagtcgttgccatagttatgtctctaaattgagcccagggtagttggccacagcactgaccttactggggtcagggctgcttcctgactgtgtgactccatatcccaggaattaaagccacccttccaaatggctggcttcctgccagaggaaagacagtctgagctcctcagctcaactgtctggagatttcctgtaaatctcttaaatgtggaataaaaatctttgaaactctggcacaccagtgatggctgtagaactgtccactccactttgctactatactgggaatacgggacagggggacttcacatcagattggcaatagctaatgataatcacagcagatgtcctgtctgagacttggctaaccaatagtttccttaatctcccttttctagaaaattccttcctcctcccacaggcactgcctcaaggagttcttttatcccctcaagtgtcccttttggctctcccatgggtgacctttctacaatcccataggtttgctgtgctcagggctcagttcgatgaggatgtagccatggctttagagtctgaccctgctcctttccacctctcttgacacaccttatgtctttcagcgaggctcggaattctagaactgtttttcagaaccaagtttgcatcacctgcgcaggtgggagtagtttgaaaagtgtccattggtacgttggggttgacaggttgggtgtggaggcgaacatgcgtttgaagtagtttcttatttcatgtgcacgtggaagtcttgaaaggaaagaggaaggagtaaggagaaggaaggaggaaggaaatgaaggaggaagagtcagacaatgaacatttatttcctgtctttggctgggttcggacttcccttaatcttcagaaattttctttgttgctctctgagtttgctctctctatcttcctgcattgcttatcttaaaatttatgtcctagagtgatggctggctgtcagaaagtggcagagtagtcaggcggtgtgtccagggctgctcaagcacagagcctcccctagggtccagcaggcctgtcgtggcccagtttctgcactacctttctttctggaagtgtctctgatggggtgttctcgtttcctttctgtggctgtgataaacactctgaacaagaacaacgcagggaagagaaatggttatttcagcattcgggttacagtctaccattcagtgaagctagagcaggaactcagctcttctatacatcattgcctcccaccaagtaactcatttcactaaggaccacagagaatgctgtggaccaggctggccttgaactcatagaggtcaatctgcctctgcctcgcaagtgcttggattaaaggcgtgtgtcaccgctgctcagcttagctttcttatatagcccagaaccacatggttagggcagaatgttgggcacagtaggcccgaggtggatgccgggaacctaacttaggttagtaatcaaactgttgagccatctttccagccactaggtttcctctaactttaaatgagttagcttcaatatgtatgtatgtatgtatgtatgtatgtatgtacatatgaagacagtgcccttgtagttcagaatggggcatcaaatcccctggagctggagttacaggcatttgtgagtcacctgatctaggtgctgggaaccaaatttaggtcctctgtaagagcaaaacatgctctgaaccactgagccgtctctccagcctctgcttctagctttccaaataaccttcaaataacgtagagaagacgacagggctgttttaaaaattgcactggcttggtgcagggctagctcgaattgtggcattttaaaattggtaacaaaagagactcaatctgtgcataggagagttgggtagcagaaatatatgttcctgtgaaatgctgcacacccgtggcttatgaaactattctgatgggaatgtggtggactttgtgctattacataataccaaatggaattttggcttcactgttaatgatgtgccattgaaagaagtcagagaagaatgagatgttttaataaaagaagaaaaggcaaaggaaatccagtcaagacgtgaagccaagagccagagatggtctcttcaccccctctccctcttcctcagcccttctgcagccatctccaatacagtctcctcactagtttactgtggccctgagtccatttgtgagactgtgtgtgttagttccctttgcatcaccatgaccaaattgcctgttggaaacaaggaaaaaaaaaaaacatatgttttggctcatggtttcagagagttctgttcatggttccttggttccttgcacctgagaagaacatcatggttgggagatcttgtggcagagaagagctgacatttgaatcagggtttgcaggaagaggagaggcagggaaggggcagggagggagagggaggggagaagagtggggagggggagagagagagagtgggagggggtaaatataccttccaagggtctgtcctcctccagttaggctccacatcttaaagttttcagaacctcccaaaatagcactaccagctagggaccaaaactttaaaaccatgggagacatttcagaatccatgcgcaacactgtgggtctcatcgccttcttgcaagattgtagcatttcatttctccagctcccggtgcatcctcctggtgcatgctggccggcgttgatcgtggggaggataagttcatggctatggcgtcttagagaagaagcggagcacagacaactttgcagactactttgagttccagtagagggcggatggcagatgggactcttaatcttcatgccgcttcttcacactctttgtacgtccagggtgcacgaatcgtgtacctggcaagcacggccatgtactggcactaggagcaagagggctggctctgagcctcctggtagagaagacgatagaggctccctagaggcaggcagaacacaaggaatcagacaagttgaaatgcgaacagacgagtagaaggaaaatggatggcaaatcagaggagatgggaggcagggaggagacgggacggatgcgggtgcagctggatccgactgagcacggggctctcagaagatctctgcccctggctggcagcctttcctttcctgtcccgtggttctctcttccttcctctctccccacttccaagcctcctttgtctcttcacagttattgactttcgtgatgaattgcaatccaatgcagttttcaaaaggttttatttttatttacacattttgagtcattaataagcatatgcagtataaaattcaagacagaaatggacatactaacaatgaggtctcccttatacttactaccagcccctctacaaaggaatcactgctaatgatttattgtgtgtttttttttccaaagagactctatgtaaacacatacaccctgttttacatattactccctggccttattcagccatatgatttgaggaatggtgccatattggtacatacagagctgctttgctgactgcgaaggctgtgcagaatccagtcttccagcttcgccttcctttacaagtcttgtgctgaaggacacaacacttgttggcaaccccttgctgtagtgagctaccccgtcagctgtgctttgggacacgtgaccttgtgctggagaaacaaattgctagaacaggggattcctggtcagaaggtatatgctttttaaaatttggaggaaaaataccgatgcatttctttcatttccactttgcaaaaccagtgagtttagttcccaacatcctcggcaggtgtttcacaaccacctgtgatttcagatcggagaggggggcgggggggggggaggggggaatctgatgcccccttgtggctcctaagggcacctgcacttgttgcccatgcccacacagacaaacataaataaatcataaaaattaacaaaacaaaaataaaatagctcgggtttccatgaggaatttagtgtgcggtgatttctttggctggtatgagcgatgcatcaggaaaatccagatggggggtgtcaaattcatgaggtcaacaacagagagagactggagatgaagaaggagccaagaaccaataatacaagagaaacacatcagggcatggcttttctttttagagaagccagtatatctggattaagccatgccaatgtggtaactatgcaaagattattgttcattttgccgtgctgacgtttcccctggactgtggtctaatagcttccttctcttcttggacctggcatccacagtgcactttggcatgactgggatatcttttcactagaaattgcatataaaacccacggtttcactgcaaataaatgttcagatttaccgtgacatgactgtggggcagtatttccatccgtgatgcccttggctacttctgtgttcgagtgtgctcagggtgaactgagccatctcgtttgcagtgagggaccttgaggtggcagcaccgccacattcaattctgctgcactccgagttcattacaaagtgaaaggaaaaatcgcgataaatcagaataacactgattgttataattttattatcagagcgttaagtcaataaaacttaacgaaaacgtcatttgaattgtgtactcgtttttactagttgtccggcatgttctaaaagcacatccaaaacaacaaaatgaagaaattagtgataaattgtgagaaagctgggtcttgtcttatgctgcagtaaaactagattttctttttgcattgtaaaatattccttttgaagatgttaacgtacccataatgccttccgtctgctggactgcatttagcatcctattgtctgctttcgtgttttcgtatcatctggccttttatcatgtatggttgtatataggaggggccggctcatatatgaaatcccctcaggaaagaaggtgtttttttttttaaatgagaaataaagaaatgtatttatgaaaggagtcagagaaatttactgagagatgtctataatagaaacacagaaaggtaacaccccctcccccttagaagcatattcactactgggagggggttcccaagctatggagcagttttataaaaggcacggtgttaggtgataccatactgcttacatcaggcacaatacatgattactgtgcacttttatcttgtcaattgctgtcagattattatagtattgctgtataattactgaagatacaagacactaaaacgtttgcccccatgtttccccatttttcctctttaattttaagagataggtatgctgacatgtcatttatgggatgttggaaaggtaaattcagaatgtgttgtgggtttaatctttttttcacctttaatctttctgcagtgcaggctggctttgaactaaccccctggtactgagattaccggcatggaccactatgccaagctcaataggatgtttttagaagaattccaacataaggcgctctgctgtggtgtacagacattggactagatttagattggaaatcaaatggttggggttctgtggactcagagccctttttccccgaacccaacccacttgtttgtatactgtgttgggactggagtaagcatgtagtgtgtgtgtgtgtgtgtgtgtgtgtgtgtgtgtgtgtgtgtgactttctgagtttatgttatttcacatgtcatgtatatgcaggactcccaggaggctagaaggtcaaactactctagaatacccccactcacctccccgcctggtgtgccccaccagcctctcagatgactctaaatcagatctggttgacagtgaagatcgaccacggcacaaccacggcacagagaagttgcctgcactgtgactcaaacccagagtctgttatgttaaaagtgacatgtgtttttgataaccaccccttagatacatggtcttttctttctggagaattgtcgtaaatagatgtgtcataggtgatccaaaacagaattcaattagatgttcacattttatctgagtgtcattgatacaaagatggaaatggtgtagggttaaatgtaaattgttaagagatgccttttggtcccaccatccagcactgcaaatctcaaacaagccggttattagataaaatacttattctactcttgcaaagaactattgatttaatttgggtgacagtgtcaatttgagggagttgagtgactgtgttgggaagtatctgagtgaaaatggtctacccagacaaattctttgaattgcactaacaatggcatgtgtgtatggacttcagaggtgacctgtagcatggttgctgcttcatgtgctgagggtacacacatgcacatgcaaactcgaacacatgcacatgggtacacactcacacacacaaagatatatattgagagcaggttccctaagatgacagtttcttgttcccagaacacattcagagtgacagtgaaagacacatgggtgtctaagcagaagcaacagggaaaaggggcctctaaaacatctaacccagagtctgctcatgttatttttaaaaattatttttatgtgtatgggtgttttgcctaaacgtaagtctatgtattatatgcatgcctggtacccaaggaggtcagaggagggcatttggattccctggaactggagttacagatggttgtggggcaccatgtgggtgctgggaactgaacctgggtctcttgggtcttctgcaagagccatctctccaatcccaacaaatttactttttaaagtcattttgaattgtgtgtgtgtgtgtgtgtgtgtgtgtgtgtgtgtgtgtgaacatgcctgaagaggccagagagttgcatacccctggagctggcattacagctggttgtaagccatctgacgttggttctgggaattaaacttagatcctctgcaagagaagtcggtggtcttcatctctgagccatatccctagcctgaggcctgattaccacaggggatttttgaacacattgaggaggctgtggtactatcagatgtggtgcctaattggtggagataggaggaaggggggctttgaaggttgtagcctagcctactcctgcatcccactctttcccctgtgttacattgtttcgtttaggtgttttggtcacagtgatataaaataacaaatacaagacaaaagaagatattctacaaaagttgatgctatttgctctagacattaagagactagatgctaaaatttatttgaaaattcctagttctccacgctgcaatgtttccactgttgtgtgaaagtaccttgaagttgacaggagacaacccaagcccaagttctcagcaccaaggagattgatttgcctcggagggacagagggtaggggataagagacaaaggcaggagacagaggagacggagaagtgcaagggaataaaggcgaggaaagggatgtttgccctggagggacaaagggttgcatctggatagaggagaaagatgtggtccataggcaaatggtggtttataaagaaaaaaggggaaaccctcatgttaggaggagttgttaattttgattggggctttgattgttggactttaaaactctcatagcaggaccttggtgatcagtctcaggaggaggaagtgaccaaataagggaatggaccttgatgggtagctttaggaatgtgagcgaatggtttagcaaggaagagggtatgggagaaagggtaaaaggcacagcctgttggtgacgcgtttgccctgctcagtcctgctagagccagccactttgcagcttctgtgctcgactccccgggcggtgcctggaggactgactgcatcgggagcagacactattgggatcaatcgtcaacgtccagtcaaatcaagtgctcactcagctcttcctcctgtgcactcccaggactttcttgctcggggtcatctttctggttttggtagttgaaagggaccatgcagcttgtcagaaaatcaatggacagttgggctgccggaattttgaaacacacacacacacacacacacacacacacacacacacacacacacacacacggcatgtacatttaagcatataacccctcaaacacatgctcctttgagtgtgggcacgcttcttttcatgacctctgtaagctaagaaagcctttctcattcattataagtcaaaggcatttgttgctatcccatccaagccccggataactgtcacttcagcttcatgtgttgacggagaacagctttcattgtctggtatcagcagcctggggggctgattagccctgtgaggttctcaatggagtggaagccaaggaagactgagaggttttagttctacagaggtcgatcctctctctgtcttacctccgaccttgtgggaagggtttaaaacagccacccctgcctctgctacttgggagtgagggcttccagccttctatactacaccatccaatgcttccaatgtcaaagctaacaagaccatttcttttctctagggtctcccttgtgtctgccagtgtaaactccaggctacctggctcaggaccttccaggtcattctgtgtctacttcccgctggccttaggaatgctgggattatagcggcattgtgtcccttgtttgtttgtttgttttttgtggtttctgagggtcaaattcaggtcttcaggcttgtgcagcaggcacctgtctccactgagtcatcttgctgacccaacgggactttcgtatttgccactaatgcaaatgaggttggactttgtgtaagccccctttgctttgcctgtgaccaggctacggagagagcttaaggcaggggtgctggttattttgactcacagttctgagggtcccattttcttaagcatcatatatatcatggtggtggggacacttgtcagaacagctcatcttacaatggagaggaagtaggggaaggacacaggaaaggactaggggaagatacagccataagaacacacccacactgacctacacctttaaactcagccccgccccctacttcctccgctggattataagcccgcacttggataatctgctggtattggtcaaagacctcatgatctaattgtctctggagatggcatcatagtgtcacccagaggcgggcttcgtgactcccttgaggtgtttgttactcccattgggctgacaatcccagttacctgtcacagatgactttgtttctagatttctactcattggagctcacttgctctggactagagtcttgcttcctggttcatacggtatttccagatgatagtttaaacaaaagggagttcaaatagaagcccatgagtggctggacaaggcttctcccagaagatgtgagctgttgatggtatgcaggacttgggatatctctgtagaagacactggtgcaggtggccccagaggtctccaagacaacccagtctctcaccgttgcccttagctacccactgcaactacatggtaagaccctattgctgggctcagagtgtctagacaacaatctgattggattcttctcccctcacccctgttcctccctctcgacatcccttcctctctccctctgtccctccccacttccctgcctcaacttacgtgatagcattttgacatgtaaacttaggctggccttaaacttgtgatcctcctgcctcagcctcttgacacaccgtcagaattacgggcgtgcaccaccatgcccatttttgaacccattctccttttcctttaccgctattaccaccaacgccatttttctttttctttttttctttaagaaaagcaaaatatcctgtaggattctggctgcccacccagaagacttacccaccaggttaacaggctgaagggtttgattcaaaacaaattgccaagctggcactgaacagtgtgaaatccaactggctggaaaccctctcattagacagaggccatgcgcacagcaaacccaaagcacttggatgagattcctttgcaggaggcaaagccctgctatttgctgctaggcagccagttgcttctcgctaatctgttttcagtttctctttctcaacactcttgcctcttggagaaatcttattcctccccagcaccctcagtttgcctactcacttccagcacacacagtggggtcttcactaagggacgctctcttctccctttggttagcttcaagacccacaggggttgagtttgatatttggatccttaacccaacagttaggttaagaccttgtttaacctttgcagataagaaatgggggcgggggttttgttttggcagagaaagagtccgcctttgcttgaatctgcatgaagtggatgtttacatttgtgctaacatttctttctaacctctgcttggcacttgttctgctgaagaagtaggttaaaaaaaaaacacaggcaaacaaaatctaaaatagttcccatgttgtagagtcaagtgttaaccacccgctcatatcacatgtgagttagcgcctcaattttctaaacacaaaagcagcagaataaacagaagtacctgagaatggttaaaaaagggctggcttactgacttattgtcactccatggagatgagtattttgtctctgtgtatgtagatgtgccatgtgtgtgcagtgccggaggaggccagaagagggcgtcagatcctcgacaactggagttttatagagttttgagttgtcatgtgggtgctagaaactgaacctggatcctctgcaagagcagccagtgctcttaaccttcagctatccctctaggccctaaaatggggctatattattagccttgagacccaccacaaatccctgaattcttcttttcccctcgtttgagatgctgactctcataggtgtgttcctcatcacccagactgtggggggtggggtgggtggggtgggtaggagggtgggctgccccagccttgccagcatttcctgataattcagttctgtcctcatcctcctatttgcaaccttttttttttttttattggttttggtttgtttttgtttgtttgtttgtatgtttatttatttatttttgttgttgttgagacaagatatcactgtatagccctggatgacctggaactctctatgtagatcagtttaaccttgaactcatagagatttatctacctttgcctcctgagtgctgggattaaaagaatgaaccataccatgcctgctacctttacaacaacaacaaaaaaattagttttgtctcatacatatgtgcgcttgttctggatgtacatagtacatgtgtgcctattgtctgtagagggaaaaagagggcactggatccctggaactggaattaagaataactgtgagccacctggtgtgggtgcttggaacctccaaccccagtcctctgcaagagcacaaagtgctcttaggagctaagtcatccttccggtccacacttgcagtgttttaaagtcctgttatttggtatgcttatagcacaattgtccatcttcctagctgcaagtcccagaatgggctgttttgagtggggcagggagtcagcacccaggacagatggatggatgattgtgaatgtgcttcaccaccagcccctccccacacaaagccacacgtgtcctctgtctgtgatatctttctctacagcaggctcgagacttagtctctgcctccccctcgaaagctgtggcctctgcagccctcccagccgctctgtacacagctttattttttagcagccttggagttgtacatcttgttgctctgtcagtctatacagagccatctctgattgttccccaatatcagaggcagaatgctgtccaattttaatatctctctgctcgtatgcagagataatctgttccccatgacagcgaatcagaggagagactctgcaaagacacccgagggatcccagcctcctggatgccactgcaaagtcacaagaggcctctgctgggaaattaccgtgttgatttctggaggactgtttctgccttaatgctgtgtgtccctgtagctacaggaaacagcagaggaagggcaaagagggtgggaaaatgagcattggagagccccatgctccggagcagctcaatgcagcctatggctttacccctcgtgggggcatctggaaactgggaggatgtttcttcatcacagaagatgattcagaattgtataagaaggatagtctcatacccttctgagttcatggtgacaccttgttgtgtgacactattcctggggagatgagaatgtctattcctcccaaatacagaatcaatgacagaccaaagagtggatcagcttcactgggggttactcacatagctgggagcttggagcacactgcacagcctgcaggcagctgggtaggttggagagggatctagactgcagtctagaacttctttcaagtgggtcagctggtttgagagtctctccagtcttcactgcttatgtatgcttggggaaggaggtgcttctggtatttggtcagtttcagggacttcctgaagcctttgaattgttttcttcctgagcttagggagtttacctgcagggtagaatgttttaccccacccctagaaaattctcagtctttttttttttttctttgtttgttttcgagacagggtttctctgtgtagccctggctgtcctagaactcactctgtagaccaggctgaccttgaactcagaaatccacctgtctctgcctcccaagtgctgggatcaaaggcgtgcgccaccactgcccagctgaaagcttccttccaagatagactgttttatctgagacaaaatggtgcacaacacacctgctgtcacagtgtgaaaagcttccagaggctccaggaaatcagaaaccactatccttctggaaggacaaacttctatgtaaatgggcttccttccttggactcccaggtcctgagatttttatgaactaatgactagaaagaggaggtggggattgttctgccagataaaatcaaagcggggaatggcttcaaggaactcgcagatggagaaaacgaaaataatgaaaatcaatagtgcatctgaagtgatcttacagttcaatctgaacaatgctctgtgcacggaataggcaagaaaattcgtcgtatcatcgcagcgagcactttatggcaatatgtggctgctctgctaaccaccaccactaccacctcatattgccttgtgtgggacatcaaaatacagttagagccctgcgattggaaaggcatgggctctactggaaatgaacttctccggagccccaagaacacagctgcagggccatggctgcacacgagcctgtctcctctcctctgcactcttgtgcaatgcacctggtttctctgcctttatcctcctgggcctgtgtgtcctatgtgtgtttggcttacatgacaacttcgacattgctctcagacattcctaaagtcctcacccacataacctaatgattgctgtgatgacaaaggggtctgtgacatcaaaagaaaaccattcaagtacagggcatggcagtgcatgcctgtgacatcagcacttgggagactgtgtgttcaagtttagcctgggcaaagtagcaagttcaagatcagactgggctatatagtagggtctggtctccggtttccctcactccccaaagggaaaaaacagaaccaaacatttagtcttatttctaattcctggctcagagcccccaaatctttggagttttctgagcaataggattatctacagccagtcagtggcatctgattttgtgttaactcggtgactaaggttgggcctctaaggggctggttattagaaagacccagtaattagaggggtggaatgttctgcctcaccaactgactccgggaaaatgagaaggtccttttaaaattctaaaccctcttacttacaggaggtctgatgattcctgtacatgtaatgggtgtctgaagtaggggtcttgtggggcctgacgcctctctgtgctcaatggcagaaatgtgttgaatcactggacacccaggtgatatctggagaccagctgtgggaaagccatacatacaaggtcaggaatattgtactagagaaagactttcttcctcgtcatagcataaagacctgtagctccgtctataggtgtttctagcttctagtgacactgcctgtcaccatatcaggatgcaaaaatctttgttttttcttttctttccctacaccacatggctcgggtattcccatggtcctatgcacagaagaaagacagactcctcccggcagtatgccattcatcagagggaggcttgttcacctctatcgcataacacccttctagagtgtcacctcacctcacaggaagcttaacaaaggatttcctctaagcagtttttatgttgtgttttaaagatactgttttgctaaataatatctcccaggctagaccagatctcactaccatctatcctactttggcttcctgagagctggggttacagctgtgtgctaccaaatctagacagacatttttgtttcaccagaatgaagtctaaaaggaaattactcttttctctcttctacccttccttttctccagatgcaggggactgaaccctggaccttgtgcatgctcaggaaaggctggctataccactgagctccatacacctcctcttccattacgtaggctctcaagctgtcttcccaggagcctttaagtctctgctctgggaacctgtccggctgcctcttcttggtgtgctcagatcccatcagaccagatctgcaacaacataagccacatcctcaatgtctgtgtgacggggtgtgtacagcccacattgaggtgtcagagtcctctcagttctcccataccacaggggaagttctggtccaatacctggccaggcaggtctaagtctccagaagtctttgtttttgcagtgggcttacatgatatagtgggagtaattattttgggggagctgcagagagaggaccagtcttcacttttttcacaagtgggtggagtgggatagggagagtcatctgctgctgaaggttcatcatgtggccatgaatgtgggcacaaagatcagaggggtggagagctgcagctctagccatttggctccagggtgcgccagtagcatcctttgtggacttaccattggctgtctcctctgatggtgcgcatgggagaggtacacttagcaaagggatttgtactgttcttcgtccaggcttcctctgtcttctgcccgcactctgtgctttaccctcaactccaaataccctcaactctcctttcccatggtcggaagcttcaatcctttacatggctcttaccagtgtgtgcttctgacttaatgattttttgttgtttattgggtgtggtactggtttgaacgtaggcccagtacatgcagaggcaagtgctccaccaccaagctgcattccagcccctgatctgctgacccactctgggcagggtggccttgcaagaggagactgagttttcttgcttagtgggttgactgttggcccctcctctatgtgccaggcttctgtggggcgcagtatacacatatgcaatactttaatccccacaacagacaaaagatgtgggggctgttgtcccccattgcttttttttttttttaaagattaggaaccagttgttaaagtcctttagataacaccaaagaagccagaggttaacttgtatctaccagttgccaacattgtgtagtttccatggagcttgggtgcctttatgttagagggtccaagagacacattattatcccccctttcttacttttgctcatctacctatttatctattatctatctaccatctatctgcttgcctatctctctataatctagctacctatcaatggatctatcatacccatcaattgatataccaaccagtcatctgtccattattttgtgtgtatgtgtgtgtgtgtgtgtgtgtgtgtgtgtgatcacaggatctcaaaaaaaaaaaaaaaagctaaccttgaactcactgtgtagcccaggctgatcctgaactcactatgcatccaagctagctttgaactggagatcttcctgcctcagattccttagtgctagaattaaaaatgcatgccactatgcagagcaaaggaattttaaaatgttccatctcccctctctccatgttcttctaaagttggattgtttctatgtagcccaggctggccttgaatttgtgatcttgccttccagacctgggagcaccatgtttggcttggcctcttctttttaacatggatgacacagattctttgggacctggttcttccagtgctgtcccttgttaaggtttaaccacactcaatggagaaggagtcaggtatgaaaacacaattcctatgggaggggaagtgcttgctttggggtcttatacacccaagcgtcatctcttcccatgctgcttcactgctttgtcataggtgctgatcccaggacacaccctcaggtcctggagtgaatgctcagatcctagaaagcaggctgagatcctgggatgcatgctcacgtcctggggtgcaggctcagatcccggaggcatgtaacccaagatccaggtgatttttcatggttgcaagattcccagacattcaccaaagccttggtgacttgattagacatcagatctccagagagcctgtgggatgaattgcctgaagtaggcacaacagttggatggcttttggcagagccccagggagacagtggcagtcctgattggtctgttcctttgcacactgtcacagtttctggcaacttgatacaaacctagctatacctgggaagagggaacttggattgaggaatcgcccccattacattggcctgtggacacatctgtacaggatttgtttgtttggttttgttaatgattgattgtgctggtgggttttggctatatgaaaaaggtggatgacagaggcacggggaacaagccagtatgcagggttcctttatgatctctcagttcctgcctccagcttcccaccttgattccctgcctccgttttctttgatagtggactgtaactgggaagtcaaacactcccctttctcccaggcttgggtttaggtcaatgtttatcccaggaacagtgaagcaaactgggacacaggcctcgcatcatttaaaggtaaagagttgacggtgaagacggacgtgtgacggctgtgtgtgttggcatgtgtatttgtggacgacgtgtggctgaaacgtgtgttgacaatgttggaacggaacagactctgaagcaacagcattgatctgagtgtttgtgccgctgaggcgagggaggaagtggctattgctgggcttccagccagttctgctgtcccgggttcacactccccgacagcctgtgaaggcagcgcttatggtagggatcacgcgtctctgtgctggggctcagtctgtgaggaatcggaggcctcgatgagttgctggagtcctcctggcacatctctgagctgagggatgctgccagatcactacttcccagacgaatgtgcgagcgagcgagcgctcgaagtcaacccagaagatcttaaaaaaaaaaaaaaaaaaaaaaaccgaggcaaatctcgagggaataaggaagatgctttctttgtgaattattattattttgccttctggaagctaccagaaaatttccacttggactaaacctgctacggtgccctgctctgtctagtgcactttcctgaggtatggggtttgtgtgttgagatgctaccagggacagaagaaggggcgaaagcccagagtacccactggctggtgggccttaggaatgccattcatttattctgttccaaacccaccaggagcacaattaccatcacattaatacccagaaagaccaaggctagtatttatagctcaaaataaacagtataaaatcccagcatcttatgatctttaaatgaaaccgaggcagataatttatggtcttaagtgactgtgtgaagatgcagaacccagcggagactcgggaggctgtggggtgtttctcagaaaccttcggcatccactgcaagtttattaagtgcgggaaccagacagcacgtctgcctatcgtggatatttgattatcagctttttactttcctccacttgacccaatgcaatattttcttacagagctgcggcaccgggagattctgacgggatcccacagggagaagcacaattaagaatctcatgcaacagagcatccctttgtccttgtgattagcgcaagtgaggccattcaccctgggcagaatagtgctgatgcaggttctctggagtttggctttttatgtgcatagaaccatatttgcagattaaaaaaaaaagccaaacaaacaaacaaacaaaaaaaccccttgtctcctcacaagctgtggtattttattacctcagcagtatgaacagtaaggcattgactttaggataacaacgattgttttagcagcaatctgttctggtggatactcttagaatatttcatacgtatcagttttttttttataaataaaaacctttaaggctacgtctacctaattcccaaacatattctcatttcagtagaaaagtttaaaagagaaaaaaagcaattaatgagccacctcatggtgtatagatagaaatatctagataatcacactcgtgtttgatttggcttgattgattaattaattaaacatttattgagcccaggccgtgctagcggctgctttgccgagtctgatagtcagggacctgaaaggtaatttgcaaacgttggtccttcctgcaaagagcactgggagaggcgatcatgatgagcaatcaccctcatcagcagaggtgagaagggcctctctctcacttactcccggcttcacactggttgcccctgagggtcacaggctgagcgcttggttctggtagtactggggcatcaggtctctccttgtacctgcaacgggaagacatagaacatggatgtgtgcatgctcatggatatttatgtgtgcatacatgaagactgggtagactcgggcagggggtggaagtcccacttctatcattggggggatgttggtgggtatcaaattgtaagatgctcgcttgtgccctctgatgcggtcattccactttctgggcattatcttaatgtaatccagtgtccgtgatgctaatatttcttatttcattgttcatccatcagctatctaatgagcttcggctgcattccagggactgttcaggggggtcaagaagcagcaacgaacaagacagattggttcttgctttccagtagcttgcgttctaacatgggaggcagatgatgatcaggagactacagagcagctagccccttctttctggtgagcctgcagcgtgaagatgtacaatttgaagaagtcaggccctcaccaggtgacctcatttgctttctacagctgcaataaataccatgaccaaaatcaacttgggaaggataaggtttctttcattttacacctcctggattgaagtccatcatgaatcccaggcagatccagggaggcagggaccaaaacagatgcggtggaggaatgctgcttactggtgtcctcctcatggcttgctcggtttgctttctatacaacctaggaccatctaccattgtccacagtaggttggccccttcctcatcaatcgttaattaagaaagtctctccccatttgccctcgggtatctaaccgaggcaacccctcaactgaggtttcttcttctctgatgtcttagttacttgactatggctgtgaagagacaccatgtccacggcaacttccagaagagtttgttgggggcttccagtgtccaagggtgagctcgtgaccctcacagtggcgagcacggcaacaggtaagacgctaggcagcagctgagagctacaggcttacctgcacgtgggaggcagagacaggcgactgaggatggccccagcgctcactctccaggaacacacctcctctgtcaaggccacacttcccaacagttccaccaatggggggggggtgtcaagtatttaaatataagagcccatggaaactgttattattcaaaccaccataccagatgtgtctaggtttgtgtcatgttgacaacaaacaaaacaaaacaaacaaacaactcaaccagtacaaccaggcaacagaaatacatcattgccttgatcttggactctgaagcctctttcataagctgtccagtttatgctgattttctataaaatcctgggtgggcttatgatacacatgccagggtaccttgtttcatcaccaaggatctgattttctggtcacaccagggtcattgaatggggaacggtgttaactgttcttacatcctcccttccagcagatgtggcactccagtgctgacacagacatccccagcatctgcagttaggtgggatgatacccaaggtacttacctgttccttgtcccactgagaatccttgtacaaggagcatagctgcatggcaggaaagtggctgtctcagggaagagaggcagggactcgaagcaccctgggctcagcactcaactgcacagcctgttttgtgggctctgtcaggatgccttctcctgagctgtatgggatgctacacctgcagcccctttcttgaatggatttatggataccctaattgctgtaccttccctcttccactgtatgctcagattccttgagtgtccctggacagtggtgtgagtgtggaagatggctaacaatatgtgtattaagccagactagagaaaggcacacagacatgagaatttatgggcatgtagtaggggaactaaaacacaaagggagataaaacacaaaaggttctgtgcacctggccgaggtgaaagggccccagaatccatagctagcctattggtaagagtgtttcctgtcagtatgctgtaaaacctggaggcagacgtgtctgtttccagaggaaagaggaagtgaaagatgtcacgaagggtgaacaacctaggaaacatcaccaaaggaacagagtttttatttcgttattgacctctaagaaatggacaggtaactccatattagatctaattatagattcaaatttcaacatctctaatgccataatggtgtttgccttagtcatactaaaacaaccatagctacaacagattgttactagatatcaaatatcaaaaaaagtaatttggcttggcatggggcatgtgcctttaatcccagtcctaggagacagaggcaagtagatctctatgaatttcaagccagcctggtctacaaagtgagtttcagaccagcctgatctacatagtgagtgccaggccagcctggtctacatagtgaattccaagctaacctgtactacatgtgggttccagaatagccagggctacacaatgagaccctgtctcaaaaaattgcagcatcagaagcagaaaaggctgtaagaagaatcaaagcatggagattttatttgaaaggacagaagaagggacagagggacagtgaaacaatttatcagcaaagtggcaattgtcctatctagaaataattttcttaaataaaaatggattaaattctccaatcagaagatgtcaagtggccgaatggatgttaaaaatgaagtcaagtcacaatgaattttgtgttctgtaagagactcaagttagctttacagtgtccaaaagtaaggggtggagctgggcattgtgggtacacccagcctcccagcacctgggagttgaggcaagaggatgaagaattagagacctgtatagtaagttttaggatagttaatgctacataagttgaaatcattacaagaggcaaagaaaatcattggggtgtcataaaggagacaatccatcaagtctatgggatagtgatagatacatatcataccggacaatggtgtgtccaaatatataaagacagatgtcaacagatctgatgggagaaactgacagcaatacaataatagtaacagacccaaatccagccactggtggagcacccagatgaaaaattaataaaagctcttggatctaagccacatgctagaccaagtggacctaagagacttagctagaactttgcatcctggggcaactggatatactgcttctgaagcagacatggagtcttctctacagtttggagcataaatgaggtcctaatcaatacaagaaaatggaaggtatttgaaatatcttttcacaaagttggcagaaaatcataaatacttggtatcttagttactgttctgttgctgtgaagagacaccatgaccaaagcaactcttagaaagcattagactaggggcttgtttacagttttagagggttagttcacaatcaccatggtgggaagcaagcaagcttggtgctggaaaagtagctgagaactttacatcgtgattcacaggcagcaggcagagaaagggacctctgggccttgtgtgagcttttgaaacctcaaagccaacccccaataacacacctcctccagcaaggccacacctcctaatccttttgaaatggtttcattgtggaccaagcataagcacattagtctatgggggccattctcacccagactatcaactttgtgactgacacaatgtggccttaacacctgtcttaagtccaccccaggcaaagtagcataaactaggaagcagtgggtactaaacacccatttctctttgtcttagaggcttccaaatccaagataagatgattttgttgcctggtttcttcaaactctggcctcagctggaggaagcaggcccttgttctgtggtctctgtcaggacactgatcctggttgcctgcatgacttaatcatctaccaagaacccatctcctaataacgtcaccttgggggttaggatttccagggagatgtgtcataagaattttgtttttaaaaaagatttatttattttatgtatgtgagtacactgtcactctcttaagacataccagaagagggcatcagatcacattgcagatggttgtgagccaccatgtggttgctgggaattgaactcaggacctctgcaagagcagtcagtgctcttaactgctgagccatctctccagccccaacacacagtggctttaaagaagaaccaaaggagaaatgaaatagccgagccagggctggggagattgtgcagtggttagaagcatattctgatccaaaggactggagttcagttcccagtacccacgttggccagcttacaactgcctgtaacaaaactccagagggatctggtgcctctggcctccttgggcatgtgtgcatgtactcgagagcacacacacacacacacacacacacacacacacacactcacactcacacacactcagcacacacacactcagcacacacacactcagcacacactctcagcctgacaacctgatttttgattctcaggatccagatgatgggagaagagaatagacctctgcaagttgttctatgtcttccttatgcatgctgtggcacacatgtgcccctctaacaagcatatacaaacaaacaaataaataaatgtaatagattttaaaaaatatttcaaacaacctaacttatatgagcaaaaaggcattaaccaaaggagtaggagggataaagattagagcagaaacaaatgaaatcacatctagaaaaaagaaggcaacagagaagatcaatgaaataaagatcttgcttttgaaaaaaataaatcaagtggattgccattagctggactgaaggggggtaggggagacctaaaatcagcagtataaaaggagacattaaaacagatctcatagaaacatgaaggactggaagactacaagagagtactgtgcaaaaactggttaactcacagtatgtttctaatttactgatatgcactgtgaactgagattgagttatgaagaatagaaaatatgaatggagccataacaaacaaggaacaggaccctagtctcccagtgaaggcaagctctgggccagatggctttactggtgaggagagaacactgagttgcactgtatgaggccagcgttacctgggctcaaagccagacagtgccactgtaagaaaggaagatgatccatgctaatctcctccgcaaaaatccagcaaactgaacttaagaacacactcaagcagacactgagatcaaatgggtctgatctctgtgatgcaaggacggctcaacgaacaggccagaccacacggacagaacaaaggattaaaaactaggtcattatctcagttgatacagaaaacaaaataaaacacaaaaacaaaattcacaaaacttcacttcattccctgagaaaatactcaaatactatatagaagaagtgtaccttagcacaaacccacggctaatatcacagtcagcaagtggtacctgtagaactaaggtaggttatgaggatcctgtgagcctccctcccactctgcagtaggggaggtcagcagcaacatctgacttagaaacttgcccttctgttggtttcagtgttgtgagtgtatgcccggggcttctggaggccactgtaagtgctctgccccataaaggtgatgttctatgtaagtataagcccaaaggtgatgaggtgacccctcacatagagatatgggcactctcctggccctgcatgaactgcagcgttgtttacaacagccgagatctaaaataatcagtgagtctgtccacagttaaaatgacagacagctcccctatctctctcctctcttctctctcttttgtcctgccccttctttcacctatacaaacacacacatatgcacacatatatgtacactccaagagtgtacatagagtgtacaaagagactagatttgatccagcctttacaaagaagactgctattcatcatggtgaatctggagggcagggtgctaaatgaaataaggcacacacaagaagtaaacactgtatgatctgactgaaaggggatcctaagatgataactgtgtagaaacaccgagagtattatcggggacgagggtaggtttaaaggnnnnnnnnnnnnnnnnnnnnctctgggccagatggctttactggtgaattctgctgaagaggagagaacactgagttgcactgtatgaggccagcattacctgggctcaaagccagacagtgccactgtaagaaaggaagatgatccatgctaatctcctccgcggggatccagcaaactgaacttaagaacacactcaagcagacactgagatcaaatgggtctgatctctgtgatgcaaggacggctcaacgaacaggccagaccacacggacagaacaaaggattaaaaactaggtcattatctcagttgatacagaaaacaaaacacaaaaacaaaattcacaaaacttcacttcattccctgagaaaatcctcaaatactgtatagaagaagtgcaccttagcacaaacccacggctaatatcacagtcagcacgagaagtcgaaggtgttcgttaaagacaagggccaagacaagaatgcctgctccagccccttctgtatgggcagaaacatcacacagtaagaagctacaaaaggcaccagataggaaagaagaaattgctgctctttgcgtatgacatggtcttctaggcatcgaatcccagtggcaacacacaagacttttagaattagtataaatatgtaccattacagggtagaaaatgaacaaacaaaaagtagttttccatacactgtcagatgacaatccttcccctccccaaagttaagacgccccattttcaataaacagtatcgacatgaacaaagaccgcaagaccagctgtgatgttgcacgcctttaacctctgcactggagacgcagaggtaaggggattcctacgagttccaggccaaccaggacaaatagtgagattctgtctcaaaacaaacaaaaattaaaaagcaagagcatgggtgaagggcagctgaatgcctaaaagccccactctcagttattaattatgcttaactgggtcaggacaagtggtacctgtagaactaaggtaggttatgaggatcctgtgagcctccctcccactctgcagtcggggaggtcagcagcaacatctgacttagaaacttgcccttctgttggtttcagtgttgtgactgtatgcctggggcttctggaggtcactgtaagtgctctgccccataaaggtgatgttctatgtaagtataagcccaaaggtggtgaggtgacccctcacatagagatatgggcactctcctggccctgtatgcactgcagcgttgtttacaacagcccgagatctaaaataatcagtgagtctgtccacagttaaaatgacagacagctcccctatctctctcctctcttctctctcttttgtcctgccccttctttcacctatacaaacacacacatatgcacacatatatgtacactccaagagtgtacatagagtgtacaaagagactagatttgatccagcctttacaaagaagactgctattcatcatggtgaatctggagggcagggtgctaaatgaaataaggcacacacaagaagtaaacactgtatgatctgactgaaaggggatcctaagatgannnnnnnnnnnnnnnnnnnngtacctgtagaactaaggtaggttatgaggatcctgtgagcctccctcccactctgcagtaggggaggtcagcagcaacatctgacttagaaacttgcccttctgttggtttcagtgttgtgagtgtatgcctggggcttctggaggtcactgtaagtgctctgccccataaaggtgatgttctatgtaagtataagcccaaaggtgatgaggtgacccctcacatagagatatgggcactctcctggccctgcatgcactgcagcgttgtttacaacagccgagatctaaaataatcagtgagtctgtccacagttaaaatgacagacagctcccctatctctctcctctcttctctctcttttgtcctgccccttctttcacctatacaaacacacacatatgcacacatatatgtacactccaagagtgtacatagagtgtacaaagagactagatttgatccagcctttacaaagaagactgctattcatcatggtgaatctggagggcagggtgctaaatgaaataaggcacacacaagaagtaaacactgtatgatctgactgaaaggggatcctaagatgataactgtgtagaaacaccgagagtattatcggggacgagggtaggtttaaaggttctggtctaattgtacagagtttcatttgtgtagggtaagtcctggagactggtgagcagcaggacaacttggtgctgcacagatttgacccttactaagggggcagatttcaaaggttccttttgtttgtctgagacactacatagccctggctggcctggaactcactatgtagaccaggttgaccttaaactcacatagatttgctggctctgcctcccaaatgctgggattaaaggcatgcatcactatgcccagccttgaatttttaacacacacacacacacacacacacacacacacacacccctatattgcctaaagtgataggtatcttaattaacctgattatggtaatcacaagcattcggtatcaggtttccacatcttcagatccaaccaactgtgggtggagacaaaaaaattgcatcttgactagaaaaaaagtgagaacactttttcttgtcatccactgaatacaacatccactgctattccctgaggtctttcattatatcgatgacttaaaagattcaggaggattgttatgtgcaaattcctgaccgttggcccatctatccttaggagttctaatccctatagacaccaaaggacgatttcccaggatggcgactcactacatttatcccttagaagtttgccatttttatttgttagctgtacttcatagatggtggggggcaggtggtggtggtggtggggaaagccacaggattttggtgagctgttgtgcgttggagtctatgcttgcctccagcagctgcttggtgattccaaagacctgggacaggagaatcaccttctccagaaacagtgatggccctggctggtcacatacaaaagcaagtgccattcaaggaggtgaagatggagaatgtgtccacagggccagttccaagacagtcttaggatgtctctcggtagctttagggtctgtgagcatgtccagagcaccctggtactagtttaaggaagaaaatgaag

SEQ ID NO: 434 - DNA, 1122 bp, Mus musculus
tttctctttttaatcaatatagcaatccatacacagaatcagaccagtagagtagaaagtacaaactcagacagaaaagggggtaaatccagtaattgccttgggccatgtagactgaaagcaaattcctgtccactgtcagcaacctttggtgggggtggctgcctggacctaattaatcacccaggcctcggactccaaacaacgatcgggatgccccaggtctggaaaggtgggcactttcaccaatggtctcagcgatctctggaaagatcagtcaatcccagaggatgtgtacgtgtgggaggccacgattgctatttttcgtttgcgctggcatttcctacaccacgcagtgcttaaaggacgggggattaaagaaacttaagctccatcctggctggcctaagcgctttcacgtctccagaaggcaaaggcgcttcagcgggacctggggagcaacgggacccccacccccagcggcacggcgggcccggggtctccacaggcccgacagagggacgacagtacacacagggccctggagctcaggctcgggtgcgtggcagtgccgcgggcgtcaccggcgaggaggaagcgggcgtcaccagcgaggccgcacatggccggcggcgctcaagcggaggggcggcccggggcgcggtacctgcggtcgggcggcgggctgctgctcctgcgagcctcctttggccggccgggaccccaccgtaccctcgccctcgtccgcctcgctcccgactcctttccctctctttccccctttttgccccttcctcggccgtggctccaagatggcggcgccgagacagatcacgtgagcggcgagccggtcagctccagtgacgttcacagaatcaccttgcagagattgccctgtgatcaagcgcttggtagcaagaagcctccaaaccagagctgcggcaccgggagattctgacgggatcccacagggagaagcacaattaagaatctcatgcaacagagcatccctttgtccttgtgattagcgcaagtgaggccattcaccctgggcagaatagtgctgatgcaggttctctggagtttggctttttatgtgcatagaaccatatttgcagatta

SEQ ID NO: 435 - protein, 217 aa, Mus musculus
SPRPRTPNNDRDAPGLERWALSPMVSAISGKISQSQRMCTCGRPRLLFFVCAGISYTTQCLKDGGLKKLKLHPGWPKRFHVSRRQRRFSGTWGATGPPPPAARRRLHRPDRGTTVHTGPWSSGSGAWQCRGRHRRGGSGRHQRGRTWPAALKRRGGPGRGTCGRAAGCCSCEPPLAGRDPTVPSPSSASLPTPFPLFPPFCPFLGRGSKMAAPRQIT

SEQ ID NO: 436 - DNA, 34161 bp, Homo sapiens
tgtgtactgcctttcaagttaccctcattcccatctaagcaccagtggaacacacacacacacacacacacacacacacacacacccttccccacccacacacacacgactgtactcagaggagcttaatcaacactgttagttgactgacttactgacaacagaccaaaggctgcctctgagactgatggtcaaagccatgaaggcaagagatgtatttagtctccatttaaaagaatctgattcggctgagctcagtggctcatgcctgtaatcccaacaatttgagaggccaaggagggcagatcacctgaggttaggagttcaagactggccaacattgtaaaagcctgtctccactaatataaaaatcagccgggcatggtgacaggccctgttattcccagctacttaggaggctgaagcagaagaatcacttgaacccaggaggcaaaggttgcagtgagctgagatcatgccactgcactccagcctgggcaacggagcaagattctgtctcaaaaaaaataaaaatgaaatgaaagaatctgataaaaatataagggagccaggcatggtggctcatacctgtaatcccagcactttgggagaccgagtcagaaggagtgcttgaaatcaggagtttgagaccagggtgggcaacatagcaagacccccatctctaccaaaaaaaaaaaaaattaattagccaggtgcagtagcatgcacctgtagtcctggctactctggaggctgaggtgggagggtcacttgagtccaggagttggaggctcagctaggagtcagtaggtaggatcaggccattgcattccagcctgggccacagagagagaccctgtgtcaaaaaaacaaaacaaaacaaacaaccataggggagagatgaaatgaaccgccaaagacttgctccaccggctcttcaaaggatgggaaaaaccaaaagcggctagaacctgaggccccagcccctctccgtgcaggaaagttggttctgtcactcatgggaagagtggacctggattaaacaggaaagctgagaaggatgccacatccctggttaaaaggtcagggggaaaatgagtatatcaagcaaactgagaggtgttgcaatttcagaagcaaagtaattttcttagatgacagcataagccactttcagctttttcttttctttgatccatcagcgttgccctggccaccaaccaagttcacacagtccaagcagacattctggattgcatcaacatgttagcactcttcgttttcaaaatgtagaccatatatagctaagattaaacctgtagcaaccagcccctagatgtcattgttgctgctgaaatatcaactcttgagtcttggaatttttacatctgaagagatagcagtgttcatctgaataagccccttaaataatgcaaattcaattcactttcggtttttcaaagccaagtccaaagtcttctggacttcttaaccaaaatgcaactaaatcttagggtgttagcacacattcagttgccaacaaaatccgcattcaggaaaaataggctgaaaaacccacgtagtcgtatgtgacattcctaacgtgctcacatcaaattccacgacataagctgattatggagtcgctgggcgattctgcccttcttcttttcgtgtgttgtctgacttctgtgcctgcctctgtcatcggtgtctggagctcagagccgtctgtgccttgcgaacagcagcttccaatcaagggcgcgtggaagagcagaagcgcccaccctgtttccaacaagccattgaatgcgacatattctttgttcacagtgtccttcaactccatctcttccttccatttcatatcattccagtcccagtctttgcaagaacaatactttattgtttactgattgctttctatgagtcagacacacattcggttctttaaacttttcaatggccctgtaaggtaggtatgaagtaactgaggcacagagaggtacagtaacttgcccaggacacacagctagtgagtgctaacaggttttgaagcacagggtcaatgaaaaccggtccacagactagattcttagggcctctctgtggccaactcccttgtctctaactggatgccacgtttattctctttccaagcctccggccctcaatctcacaccctatcttcccaaaagatgcttttgagtagctcctccaataaactttatgcttgggagcatgtctgctaaatgaaatcacttttttcttcgatcattcagtgtttactgaatgtagctacattttaggccctgttctaggccggaagggcaggagagatattgatgaacaaaactgacaagctcccctgggctcttgaagctcatttcccaccagggtagacacgtgttgaggcagtgattacacatggaattaatgacaagagagtgaagtccacaaagacgcaggaaatcacacaagcagagcgcccgacatgggccctccaacagaaggccctcaacagaggcctgctgcctgtctctgcctggcccagtcccagccccaatctgcctttctggccagagctcttcctgctccccatactgagtcctccaaccccagcagaggggtctccacgatccagatagatgccctgtgtccgtgtgcacctccctgctccattcaggttggtccattttcttccacgtgccaaggtgacccattcttgaacttaggtagctcagattctgctttcccattacctggtcctagggatgtccctgcaggtggcctagagatatgagtggaaggaggaggcctgatgcaagagggatggacatggcagcctgaccacctaatcatgaagcttcatgcaccccacagctccactcatgcctaattctggatgcaccacttatatctggcgacagatttctactgggccttcctgccttctggccttgtggagctgaagatgaggccagaaggggcatgcaatttgctatttgcagtgtggatgatacggtttggctctgtgtccccacccaaatctcatctcaaattgtaatccccatatgtcgggagggtcctggtgggggtgattaaatcatgtgggcggacgtctcccttgctgttctcatgatagtgagtgagttctcatgagatctggttgtttgaagtttgtggtacttccccccttactctgtctctctcctgctccaaccatggtaagatatgcttgtttcctcttgcctgatgccatgattgtaagtctccggaggcctttcagtcacgcttcctcttaagcctgcagaactgtgagtcaattaaacctcttttcttcataaattacccagtctcaggtagctctttagagcagtgtgagaacggactaatatagtgaactttctctgggtacgatatgcattttttcctttcctttatcactcatgtctctttctcagtgaaagaaacatcccaggctgggcatggtggctcacgcctgtaatcccagcactttgggaggccaagatgggtggatcacttgaggtcaggagttcaagaccagcctgggcaacatggtaaaaccccatctctactaaaaatacaaaaattagccaggcatggtgacatatgcctgtattcccagctactcgggaggctgaggcaggagaatcgttggaacccaggaggcagaggttgcagtgagctgagattgcaccactgcactccagcctgggtgacagagcgagagtgtcagtgtcaaaaaataaaaattaattaattaattaattaattaaataaacatcccagaaggtcaaatactataccatgttccctctgcttggtcttccccagtatacgaagagctcaagctgggaatcttagaagatagactccttgcaatctgcagttatccatttactgatgtcttaagcaagaagtagaactcccagccagtcggtgatgatgccagcagctcctcctagtctatcacctcaaaaggagctgtcaaaataacaaatgacatatttttaagttgcaggattaccccttagctgggctttcttggtttgattagcagttacttttccttttagtgtctttcttcatcttctcctccttcttcttttcattttcttcctctgctccactcatcaataaaggccactgttttcaggaaactgcttccctaggaagaattgaacagtatactattacaatcatattgtcttgttcagaagcaggtggtattacctgtcaacaggggtttggggcagagcaaatagctcccacccagctcggtgaagccactccctggctcctgggtagagaaaaatggccaaagaagagagctctttggaggcctcaaaatctcattttcattccctttgcagagaagagactgactttattgacaaagacgactgaaaattgcttgagcgttccaataaccagtctgcgttgaggcagaaagacagtctggcggaggcaagctccctgctccaccgctagctccgccgagccacgctttcctgcagcaccagtctgtggcatatgcagactagactgaaaggagcctcctgtcggcctcaaaagcagcccccctccacctccactcccagcctgctggtgcgtttcctggatcccaatcacaaatcaacacgaatgcagggaatctctgccagacaccaaactcttaggctgattcaggagcttggggtcaggcctaagttggcttggaccaggcacaggtcccattttccactggagtgccctgtggcttggctgcacattgcgcgtgggccactagatgtcaccattattgattcttgtccttatacccaggtcctgagtctaagacagggtctcagggctaggagaactctggagagaattccatcgcagcgttgactgcagggctgctatatttgctatgtctgagttcctcggtgggccttttctaaataagttagcatctcagccccaaaacagctgagctgcaaattaagcaaagaccagtattagccagagccaaccctgattttcacaatcacgtcccctgccctttctcctcctcttcatcgtcagggttggtcattatgcatccttctggtttacttgggccctcaataagaaataaattaatatgtatgcctcatagcaccaaggattttagatgttgatgtgctgttgaagaaacataggtctgtggcttttagcagagaatgaatgacagagggataatttatgatggtccttgagacctgaactacaattatgaagtatttctaggtgtatattcaggatgcaaagtgcaaggaacccagagctaatgttaatttattactgacagctgtatatataataatatatcacgtcttttcatcttacattccttctgacttacatcaagcaatcttttcattcattaataaaatcaagtcttgccattattcttaatgatgaagtcccatcttgaacccagaggactcctatcattaaactccgtgcttctatataccagtcatctgaagctcaaaaaaaaggataaattgaacttcttgttttacaagcaaggtgaaaacatcggaaagatagagcccacttgctcacagtcccacaagggctaagtagcaaagtcagggacaatttcggggtttatttttctcagctcgcactaccacatccttttttgccttttagctctcttgcctcctctcacctttctacaatctctccttttttgaggcagtattttttttttttttttttttttttttgagacggagtctcgctctgtcgcccaggctggagtgcagtggcgggatctcggctcactgcaagctccgcctcctgggttcacgccatgcctcagcctcccaagtagctgggactacaggcgcccgccactacgcccggctaatttttttgtatttttagtagagacggggtttcaccgttttagccgggatggtctcgatctcctgacctcgtgatccgcccgcctcggcctcccaaagtgctgggattacaggcgtgagccaccgcgcccggccgaggcagtatattttttaaaggtcatgataaaaattacaccttaaagaaatacgggccacacgtctcgtccaattttcggttctgtgccaaagacttacatgattaatcccttcaaaacaaatctaatctaatcttatcacaccaaagacaaggtgtccttcataagtattgtggctggaaacaagtaggtcttcctccagtttcaactcgttcaatgtctcattcagtttacaaccagtcatcaccttggcaacttactcgaggcactgtcttcagcgttcccaaaacgtaagtagtgctccagttcagcttgtaaaatcatcaaactccgtggtcactttaggagatacagagacccatgatacttgtagataaagcgaaacctttagcctcatcgactaattaatggcctcaaagtaaaataatgaggtgtgtggagatagggattcagttactgggtcatctctcatctggagacacaatcagattccactgaataggcgctagataactgaataagcgagtttcctatctataatactaaatcttactaggattgtttaattaaatcatgataaataacactctgtggcaggtgagaggtgctgagaagagcttaggtgagatgtccacaagttcaatggaactacatctgaatgcctttgcattcttctgacttaaaaatgttgactgtaactttccagagagttcttttctaggaaagagaaatactgaggtgctgtgtcccaggctttttgaagttgtcttggttttcctatcagattctgcattgtatactttctcagtcttcaggaatgaaggtcctaattccttcattatcattcctttctgcctataatgatttcttcctaatggctctggctgttccaggtacatcagagtagggagtgggtatcagtggctgtgtcatgctacagtaacaagcagatttctcaaagaactaacattagaactaccattccacccaacaatcccactactgggtgtatacccaaaggaagataaatcattttaccgaaaagacacctgcactcatatatttactgaagcactattcacaattgcaaagacatggaatcaactgaagtgccatcaatggtagactgcataaagaaaatgcggtacatatacagcaaggaatactatgcagccataaaaaagaacaaaatcatgtcccttgcagcaacatggatgcagctagaggccattatcctaagcaaattaacacagaaacagaaagcccaatactgcatgttctcacttataagtgagagctaaacatggggtatacatggacataaagaagggaacaatgaacactgcagatcccaaaaagggagaggcagggaggggggcaaggtttgaaaaactacctatagggtacaatgttcactatttgggtgagggaatcaatggaagcccatacctcagcatcatctaatataccatgtaacaaatctgcacatggacctccctaatctaaaattgaaggaaaaaaaaggccaggtgcggtggttcatgcctgtaatcccagcaatttgggaggccaaggtgggtggatcatctgaggtcgggagttcgagatcagcctggctgacatggtgaaaccccatctactaaaaatacaaaaacaagccgggcgtggtgatatgtgcctgtaatcccagctactctggaggctgaggcaggagaatggcttgaacccagcaggtggaggttgcagtgtgccggaatcgcaccattgtactccacccgtggcgacagggtgagactctgtctcaaaaaaacaacaacaaaaaatcagctccaaaatcatcagagacttgctcaccctacatatccaccaccatgggtcagctggggactcagctcatcattgtccctctaagatgctggctgacgggatggccgccacctgaaacactgccagtcatcaagccaaagggaaacatactctggagggaactgcactggcaattaaatgctccagtatgaagggaatgccctcactcccacacacgatccattagccaacaccagtactggccacacccccgagccacagggtcaatggaaactaaccttatgccagaagagggacaatgggaactagctggtgaataccagtaatgaccaccacaggaacttcaaacgaagatacactttcgttcgcttgttttaaaagttctttattatccctagattatattttctctattgtgtttctgcactctcccttgatcaaataattctgtcatttcgtctgtctactttcagattcatggacattacacttaagacatgactaacgaaaagcctctcttcagataatgataagttaggattgtttgtgccaatagcccaaggcaaggaatttctcatattacttgtttgttctccctttcaacacttcgtatttctgggttttcttcactgttttttctttccacccttccatgctagtctcctgctcaatctcttaccttttatcgaaaaaaaaattactcaacattttattttttcacagctatttggtctaattggcaaaggattctgtggaatagcagaattctaactttgcagccgggcgcggtggctcacgccggtaaccccagcactttgggaggctgaggcgggcggatcatgatgtcaagagatcgagaccatcctggccaacatggtgaaaccccgtctctactaaaaatacaaaaaaattagctgggcatggtggcacgccctgtagtgccagctactcgggaggctgaggcaggagaatcacttgaacctgggaggtggaggttgcagtgagccgagattgcgcccctgcactccagcctggggagagagtgagactctgactcaaaaaaataaaataaaaataaaaataaaaattctaactttgctggtttcctaacccccaaattcagatgaatttgaattctgaaatacagtaacaggaattatcagcctgtctgattctaaattttgttggatcttcctcccaggaccgtggacagcccagccagctgtaaaggcctctaaaaagatctggaacagatccccaagaggtatctcaccaaatgagtccattccactacaatggccagaatcttcagttttacacccttgctcatgcccaccgctcacccggagtccagacccaagcaccatgctgcgtagttcctaatacggcaaaactatccagcatttttggtgaaattggctggaatgcttcacttagtccgtttttcactgttagcaggagaaccaccctagtatctttcataaaacagatccgaatgacaaacaccatcgtgccctcggagggctgagcttgtgttactgggtctggtcctacaaaccctgaaaatcctgaatctctcaagcaaagagattccccagggccagctctggcccttaacaggcaccccttaacgccaagctgcgaatctggctaggacctctatattttagccaagaacaccttgaaatgtacagtcctaccaaaggaactaatacaaatccagaagcacaaggctaaagaaaaaaaaaaaaaaaaccccaatgcccattgttgaaagccaattgcggggtgagtggggtgataaggctagcccacagcggatttaggcgacgtggggagatgccaaagtgaatacacggtgacttctaaatctagacgtctggaaggggccatgagagccagacaactgggcccgaaccccgcccgggagccagggtttgcaaggggctaaaccggctggggagcctccctctcgcgggtccagcctcggcggcccgggacgccggtaggcggggcctgagcctcgccccgcccccgctgcccgccattcgggtcacctgacccacccgcggctcacgtgatccgtccccagcgccgccattttggagctccggatgaggagggggaaaccgggggaaaagagggaaaagagccgggagagaggtgggcaaggacgagggcgagggcacggccgggtcctggctggccaaacgaggctcgcggaagcagcagccgccgcctgaccgcaggtaccgcgccccggggccgcccctccgcccgctgttagcgccgccgccggccatgtgcatcctcccctcaggcctctgccggcgctcgcttcctcctcagccggccgacccccgcccggtgctagccacaagccccaagttccgtgtcccggttctgtcttctgtgcagcaaggcctgcggagactctgggcttgccctgcagctgggggtggggggaacttgctgctccctgcatactgtcaccagcccggcccgcccgcaggcgttgcttccttctccaggcgttgcttctttctgcaaatgtgagatcgcttaggccagccgggatggacccagccacgatgttctcacagcatcttttgattaattttctaagctccctcattcccgacccatcacctcagtcctttagccagtgcgtggtgtagaaaaagctactacagaaacgcagccctggtcttctgcatttattaccatcctctggagatagaatgatgtctccagagatcacggagaccatcagggaaagttcccacctcttaagacctgggggcatcggaatgaatggtttgtgtagaaggccgggatgattaataaggtggcggccactttcccaaccccaaggcggtatttttaagtttctgcagtgggctgtaatttgctatcagtctgcatcgctcttctcaggcaattactggatttatcacctctttgagtttgcactttctccagtactcccctctcactcagagtatgggttgcattattgattaaaagaaagcctggcccttcattcctttacctcactaactcgttgaaaattaacttcaggggagccctaaagatgttttttctgccctggcagtgagctattttacttaaccgtaatcgataaggtagttgcattctaggtgaaacgaataagcatttttttatcttttagatttattccagccagtataagaaacagtggcaaagaaatgtaggaccagagtaggaaactgcgttagaagatatataggtcacaccactgtgtcatatctttttatgctgtttttctgcctattgtgcttggttgcagaatcactcgttagattgtatttttagtttagattaaaatagcaatgtgcaatttattgttccattctcattagaaaatgttgtcagtaaaaccaatagtgttgagtccagtacctaaattctgaggtaaaacaaaatacacaattattgggagaagtttccagagctattttttcctaacttctgcaaaatcctcaagtcggcttgttagataaattatttaaatttgcattacgtaatagggttgcatgaacattcctctgaatttctttttacatggaatattgagaaatttttcactgccaaaaaaaaaatcattactttgtttcaccaagaaagagaaatgttttgatactatatactttcgttcttggccacagctggattttgaagattgatccaagggactgtattaatttcaggaattgatttgaaagacactggctctgccacttaacagccatgtaaccttgggtaagtcacttaaaccacactgagtgtttccttatttataagactgtataacacccacctagcctgtcctaaagagttatgaggatcagataccactaacatgtttgatagagcctagctgtaaggagctgttactcttttcagtattgatattttgtacatttttattctcattgagaattaagatgaaaattggtgtattagagaaagcatggttttagagtgagattggcctggattcctgttcttaaaccagttaccactttgtgtctgtgagtctcaggtttctcatctgcaaaaaaaaaaaaaatacacaaaatttgaatattacacaaaatctacagaggcattactccctagacttgcacctcatgggcaaggatttcctcagtcatttttgtagtccccagcattctggttggcacattataggtgctcaataaatgacagtaaatctgaatattggttaatgttagttagaccttatgtcttcattgcagctgccaaattagaatattctctcaggctatgtgccaactaagaaactctagactatgaaactccatatacttgtgatatttatactcatttttttcttagtggtaattaataattaccttgggctcagaagattttaaatcaaataaattgtagccaatatagtgaggtaaatctataaataatgtgtaagcagtttccaggtaactttatagacagtttataattcagggacctgaaagttcatctagcttcaccctcttgttttacatctgagcaatctaaaactcacagagacagtgacttgcctaaggtcacacagctaattgagggcactttaggggagggacccttgagcttatgtcccctgccttcttttggctggagcaaaataaatttgtcatattttagaattacaataatctggaagaatggggaatttattggccattacttttatagcacaattttttttttttcccattttggaaaaaacaaattcttgttctgaaagagaaggttcttttgtatcatattgtacttttcttcatataaacacagaaaattacagccttttctccaggcccacatgaattgttcaacttgattttactcatgatgaccatactactgtaattataaagaactaattagatacccaaataaccaaatagcaaattataaggaaataaagacaactgaaataatttggctcctaactttttgtgagaaagatattaattagaagcatttgcctgtggaatactgttgtcaaggaaagatttgagagagttggtggaaagggttatagaacttttctggtttgggatacaacttttgtttattacttatttattggtaacaatttaatatatttaatgttgttatgtctaaacattacaaacaagaaatctcctgttttgctaatgcctgtcgtcttctttcctcctggtgaactttcctattcagccatatcgatcttttcactcacccccagatagcatgcttattcttacttctaaaaatatagtcatgtcatggctgcttttctggtcactgctacccttgtgtcaacttgtatcagcagtattccaaggaagcaaatggcacgttgaaatgaggataattcaaggaaggtatatttacaaagatattagtaataaaggtgttggacttcaataagcaaaccacagcataatgcagttatctggagctagcagcattaggagagggagaggcatcagaatcagaagaagggtcttggagagcagcctacctggaaagaaatagccttctattgaggaacacagccaatccaaggtgacctagaggtagagaaccaggacgatgaatattctgatctcactctgctacctccctctgatctgtcatggttcttcattggctgacctcaaccagaaggcagaggacaggggagcctagtgatgtaatccctctgacagagagcagaatggaaaggaggatacagtgagcctagagggcaaatggatgatgtctggcatgctgcccatcctttgggaaccagtggacatcttacctctccatgaagcttttgcttaccttgctagcccaaaagagctcttcagtatctttcaggatttagtcattgactgttgccttttattttaccttgtgtaccattgcgttgtttaaatgctgttactttttaacttccaaatgtttgccttatccactcaactcagttttaaactgcaagtattaagaatttaaaatttttcctgatactttgccttgcgccttgcacataacaatttgtttgttacacacacacacatatttgtatttctgcattagtggtctaaataaaatttctgtgattttaaggaatcaagaaagttgaaggattggccttaaggtaacttcccctctgtgtatactttattatgatctgtttagcctttttattatgaaaaatgttaaacatttacataagtagaaagaacagtgaattcctaggtactcatcatgcaacttcaattacagaattagtcattctttctttattctcatcctatccaccccaccactgcagtatcaccaaggtaattgttttaaagctgtgcttacactgatctcttggaggccaaggagagtatgcagattgtcatagtttatgttgtcatcactattgagccactgacattgtatgtatactccttatttcatctcttttgttcagatttgcttcacttgacacacaatctcatatatatgtatttctgcattagtggtctaagtaacatttttgtgaaaattgaaagagttggccttacagtaacttcccctctgtgtatactttattatcagctgtttatctaacctttttttttttttttaacagagacttgtttttatgagattaacctgtgcattgattttgcatggggacccaaactggtttttcaggtgtttcctgacgtatttcatgttgtcatatctgttttatagctgccattactgtacttatccccaaatgtatgcagcctttaaaatgagatacttacataaatgttcagggaaaattggagcatctgctgcaaatttccattagctcttaatgcctgagccgacacagctttaaaaatctgaatgttttgtcagattcttttgtattagtctttttcttgagttaagatgaactcctccttctcttcatttcactttctttttaaggtacacactgaaatatccacagggagcaatttgcactggtctgtgtcacttctcttattaagtagaagaaagataacatgagtcacctttgtaaccctacgggtgtgcaaagtctcttgagcaaacattcacttgttaacctccagatgatcagtcagcctacatgggtgttacatttcatggggaaggagaccttagatctacagcagagagccgtatcgtgttcaggaggattcctattattaaacttattatttaatcaatttgcatttaaccattgaactgacagacataaggccttaagttaatcaccttaaagggaaatcagtagtcacatgaagagccacagctcctcttggcctaaaaatgtggaattctaagacaataaagtgacttaggaagtcacaaaagggtttttctaaggaaacaaattgttcccccattggtctcctctttaatgacttacagctgagcgtagagatctaaaaagacttttgttccttctacctgagaaagatgaaacagaactagtcttttgagagattgtttaagggagagtggctgaaggaccacgggcctttgggagccagggtagctgtcattgttggaatggccatggaatgcatgtgagggcagttagagacagctagtagccaagagaaaaaaagctgatgccatagggcagagtattattaggaagaagggaagaaatagtactgaagaagccaagagtaaagtgtttgcatttttgcctgatgtggacctagatctagaaagctggcttgccagaaggagtagaaaatcaggaagaaaagccatagttgctgcccagagttgtgggcgacctggcactgaagctggtcagctgtgtgtgtgtgtgtgtgtgtgtgtgtgtgtgtgtgtgtgtgtgtgtgtgtggcgtgggggggcggggcctgtttttgtgtttgtgtatatgtgtgtgtgtgtggcgtgggggcgggggggggggcggggcctggcaggacattaggtatcatcttggcaggggctgaagggcccttatatgttgattcaaccatgcggggaagaacagccatgattcaccacctaaaataagaattcagagcctgggactgaagtttaagaatagtgtggtctttggtctatagctagtgccactaaaaattttgttggcatttattgaatgttgtgagtaagattccagaatgcacctaaaatgtggaaaaacaaaacttgttgctggaaaaaagcctaaacttaaaaatgtgatccaagtcaacaaattaatctcactttaagccaaaggaaatgtttgaaatgaaagtactgccaggaaatagaaagagtattctagacttaggcagaaagatttatgggtattttatgtttagtgacttcctcagccataatgcattattagaacgaacaaataacctcttctaaggactctgttcatatctggaactgaaacacaactgggatatcaattttttccttctctgatgtcccttaccctttcagggaaaaaaaaaaaaaccatatatgtggatatgagtaatagttgaccactaatatgacctctaaaaaaaaaccacagcatagtttgtggtttatcttcaggaagataaaggaagtaaaagtaggaactagattattgcttttatttaatttcatttatatagtactttcccaaattcaatatgccctgtacaaactacatgactatagtttcacaatttcaaagatttggggagaaaaaaaacaaatttgtgattttagtaataaaactgcagctatatttggtataagaaatactctcaagaattgtatcagtcattggctttacagagtgatgtttcacagtaactggaggggtttcacatgccttgagaatggctgtgctcctttaatcaaggaataggagtctttttttttttttcttggcattgtgcaaaagggagggagtacttttggtcctgctggatgctgaaggcaaagaaagtgaagaaaaatggagaaaaagatcatcatttccgaagaaataagtgatagaggggagtatcttcatcattagtcttgatagaagattgcattgtaaagagaaattctaaccaatttaaatctatactggggatcgccgggtgtgtggacatggagcttccagcttagaaaatacttagatgagattacagacactaacattctcttatattttccaaattacatgcctgtaattatcctgtaacctggtatttttctgttttacattatcctttttagatatggaagaaagtagcagtgttgccatgttggtgccagatattggggaacaggaagctatactgactgctgaaagtatcatcagtccttcattggaaattgatgaacaaagaaaaactaaaccagatccattaatccatgttatccagaagttaagcaagatagtggaaaatgaaaagtcacaaaaatgtcttttaattgggaagaaacgcccacgttcaagtgctgcaacacactctcttgaaacccaagaactttgtgagattccggctaaagtaatccagtcacctgctgctgatactagaagggctgagatgtcacaaacaaattttacccctgacactcttgcccagaatgaagggaaggctatgtcttatcagtgtagcctttgtaagtttctatcatcatccttttccgtgttaaaagatcatattaagcaacatggtcagcaaaatgaagtgatactgatgtgctcagagtgccatattacatctagaagccaggaggaacttgaagcccacgtggtgaatgaccatgacaatgatgccaatatccacacccaatccaaagcccaacagtgcgtaagcccctccagctctttgtgtcggaaaaccacagaaagaaatgaaaccattccagatatcccagtaagtgtggacaatctacagactcatactgtccaaactgcatctgtggcagaaatgggtaggaggaaatggtatgcatacgaacagtacggcatgtatcgatgcttgttttgtagttatacttgtggccagcagagaatgttgaaaacacacgcttggaaacatgctggggaggttgattgctcctatccaatctttgaaaatgaaaatgaacccctaggcctgctggattcttcagcagctgctgcgcctggtggggtcgatgcagtcgtcattgctattggagagagtgaactgagtatccacaatgggccatcagtgcaagtgcagatttgcagctcagaacagttatcatcttcatctcctttagaacagagtgcagaaagaggagtacacctaagtcagtcagttaccctggaccccaatgaggaagaaatgctagaagtgatttctgatgcagaggagaatctgattcctgatagcctgcttacatcagcacagaaaatcatcagcagcagccccaataaaaaagggcatgttaacgtgatagtggagcgattgccaagtgctgaagaaaccctttcacagaagcgcttcctcatgaacactgaaatggaagaagggaaggacctgagcctgacagaagctcagattgggcgcgaaggaatggatgatgtttatcgtgctgataaatgtactgttgatattgggggattgatcataggctggagcagttcagagaaaaaagacgagttaatgaataaaggcctggctactgatgagaatgccccaccaggccggagaaggacaaattctgagtctcttcgattacactcattagctgcagaagcccttgtcacaatgcctataagagctgcagagttgacaagagccaacctggggcactatggagatataaaccttttagatccagatactagtcaaaggcaagtagatagtacattggcagcgtactcaaaaatgatgtcgccacttaaaaactcttcagatggattaactagtcttaaccaaagcaactccaccttggtagcactcccagagggtaggcaggaattgtcagatgggcaggttaagacaggcatcagcatgtccttactcaccgtcattgaaaaattgagagaaaggacagaccaaaacgcttcagacgatgacattttgaaagagttgcaggacaacgcccagtgccaacccaacagcgatacaagtttgtccggaaacaatgtggtggaatacatcccgaatgctgaacgaccctaccgttgccgcctgtgtcactacacaagtggcaacaagggctacatcaagcagcacttacgagtccatcgacagagacagccttatcagtgtcctatctgcgagcacatagcggacaacagcaaagatttggagagtcacatgatccaccactgtaagacaagaatataccagtgcaagcagtgtgaagaatccttccattataaggtaagcattggttcaggaagtctttcagaggaccttcgcatcttagagtgagaagggaactttgtagatctaatccaatcacctcattttatagataaggaaactgggtcccagaaaagtttgataagttgcccaaggggatcccaacttaccagtattaaagttgggactgttcagaatttctgctgtagaatccttttccctgcctgctgcctccttgacagcctctgtgttttagtgtgtatagtttaaagtgttgattttctgttgcaagagaattgtagggagtgtatagtggattgacatacgtttgacttaacgtattgacatacgtttgacttaaacaaatttaaccgtacatcatcacaacaaaaaaatacatatttttcatcttatatggccccagaatgccaggcattcagttcagcttctacataaccaacagtgatgtgtatcattgcagaaggaaaaatgggctatggcggacctattaaaaggtactgtcatggaaatagagccatgtgtgtcatgttttatgggcagggtaaagaactttcaagagttattttgactgtctgatttttatcttaagtgctgaccttatcaaaaccaatatcctgtatgaagtgctattcttttataaaggaaacgttgaatcattggtttagaacttttcttcagtgggccaggtgactccttgaaaatgtattacaaatgttatcctaagggctaactaggaggtagactttttccctcagattaccgagagctggggtctagctgtggtaaaaaggtcacaggagggaggccgaggcgggcagatcatgaggtcaggagattgagaccatcctggctaacactgtgaaaccctgtctgctaaaaatacaaaaacttagctgggtatggtggtgggcacctgtagtcccagctactcgggaggctaaggaaggagaatggcctgaacctgggaggcggagcttgcagtgagccaagatcatgccgctgcactccagcctgggcaacagagcgagactccatctcaaaaaaaaaggtaacaggaataagaaagcccttgagtctgaggttcactgcttctcagattacactcatgaaattccaagtaggatgtccacataggctgcaaagacaagttcctgaagtctccaggagtttcttttgctactgagctcttgattcatgggaatggaagtagaggagacaggatgtccttggaggagcacttccagttagatctcttacacatttagatatttcaatgaaaaattaggagtctggtgattactgattggatttttttttgtgaagttgcattattctgaacactctgctcgttcctcctctgggcctaccagtgtttcagtaaatacggacacgccctgtgtaatcacctaagaaaatggtgacttcctttcagagaatatgaagaggaactgtccgttgaatgtgattatgatttgctaatgtacttctttctataaattgtcaaatgtgtcaaatgatcctttagcagacttgattttaaaatatggtaattcgttgtactaggccatgaaagcaatgaacctgttcttctacagcctcctaagagttggacatgtatatttattgaaaattacatatttctttccactttttagagtcaattgaggaaccatgagagagaacagcacagtcttccagataccttgtcaatagcaacttctaatgagccaagaatttccagtgatacagctgatggaaaatgtgtccaggaaggtatctatgtattttgttatgcaggctgcagtgacttgcacatgacataaaagtgcccttagttgtcatggttggttattttcagggcaaaagcctatattctcctccatttttgtaccatggatgtgagtgaatctgatctctgtttctgaggaaatgccaagtactgaatgaagcagatgattactaggtcctaggtgagaagccctagatagtaaggattcatcttcagttgaaacttaagagccccttagaaggtgatgtaccagcaagccagaaaagcaagccagaaaagctacaacatggaaaacaggcctcccctccctctctcggcaccagttgacctactgagaacagagcttttgcagatggtaggcccccaccccaaactttaactggggctccccgctgtgatcttattcttacccaagtatgactgccagatttcatctgcattattaaaaaaaaaaaagcacacacacagacacacaagatctttttatgtactagttaagtagcagtcaaccgagtttctggtaataagaatattagaatcaaaagatttaattagagctccatgaaaaggcggatgccacatccggagaattaaggataaagtgtactaagctgtgccgctttggttcagctcacttaaattgatatactttaaatgtctccagtgtggcacataatgtttatgggagataagacatattggggtgactttcccttttagatttgctaagaattaaagttagaaacgactacagagtgaaatgttttaccataatgtttcattaaattataccccagaaagcataactgattctagaatgcttctgaaagaactgattttgacaccactgtagcaccaaaattctcatgtcaaacagatgtcatccctgtaaaactctctgaaacaaaaggagtttatgatatagcatctgtttttgcagtagatggctgagctaaaacagttttgtttcctttttacaaaatagccctaaatgcctccttttattttaattcattatgtttccatatcccctttaaaggagacattaaaacgtctgatatgattggaccataaatccctaatgaaaggatgaagtaaatactactcagtagcaccacctgcagttaatatcagtgttggaagatgtcttttttagcaccgtcctaaaaagcaaacatttcaaactgtccaaatgagttaacattaaaattcacaattttaataaaaagattaaagtgtcagctcaaaattaaaataaccacttcagactttacagtattaatgaatgtttactagattttatgttgcagcatcttttctttgtggctcatgctttttttttagggttacatgcatggatttttaaattgcctgccatgcctcttttcctccacctggctccatttgcttttttctctcagtactgtagcagttcaaatggctgcatacttatacctggatgggtactttattaactcaatattagatattttgaaatctggttgtcaggccaaagaaaaaatttttagctcacaaataaggtaataataattcatgctttgttaaaacttctttacctatttagtaaacttgttaaacaagaagagagatttgtgcctctgtgatcctcagtctctgccattcagatagcacagataccttagggcatgtttcagcttaacatttgcttggccaaaaggcatggcctgcctgtcttgagctagatactgtgttaggtgctgggagtacagtgaaaggcatcactgcccttcaggaatccaactcagtgaagaagacagaacgaggctgatgggtatgtcagcagataccgcaggagctcaaatagagccgcaagcaaagccctttcgtatggtgttactccatgaaacctaattaaattgttttttattggaaacctataatttgccaagcgctggggattcagtctaaacaaaacaagcagatccttatcctcagggaatagacagcttagtggcagggcagagattttacccagacatgcaggtaaagtacagactttgctaaaggaaaaatataggacttattaaactatgctgtgaggttctagcatttccaatttgtagatgagaaaactgagacttcaagaggcaaaataatttacccatgatcatactggtagaaagtggcagagcgaggactaagcccaagtttttgaactttaaatccaatattctttccattggaaacagttgcttgaagtagcacaggctctcattctgtgctatattaagtttttccatctgtcagttttattagttgtcattgatctgtaatatttctcacacaaaaccattatccaatatttcacacttcattttttagggtttttttaaaactgtatttggaacagtgccatttataatcaagtccaagtttttaacctaccaattaagagcaatacttagattataattatgattagtgtgtatattaacgttatagatttataccaggaaattaggacattttgttctgcttggcagtagttattagcaaaagaaaatttcaattttagaaaccgtaaatttaacttaaggattttctttgttgaaatttcagtgtgggttttcctttgtataataccacggattttacttttatgcggtgtatacaggtgttctacctaagctttcttcctgccaagagacacacagttcttcctgctctgcctttttcatgagcttccatgcttgctttgtttctgaatataaagcagagtgtgaatagcctgtggactgtatgctgacagacaagtacatgaagcgttgaatatcttcaagaaatcgttttatatgatcaagtcactcaactcgtgttgacataagcttaccccaacttgaattactcagccctgttgttgcagagtgagtttagtaacatggctacttttcgttggatccatgtctcctgcgtttcggagagctgcatattcatgtcagtcataacctttgtccctgtaacctgtcagttaactagaaagaattatacattgcatagcacttaaaaatttgcggccgcttttcctttcttgttgcgttggtagctgacgtttagtggtaaacaaagaaaatgcactgggtgaaaaggccttaggctttttttttgtagggtgagagtgggggagagatctcttgctctgttgcccaggctggtctccagctcctggcctccggcagtcctcccacctcagcctcccagagtactaggattatgggcatgagccaccacacctagccaggctttttatattgagttggttatatatgcttcatagccacactttataatattggagtatagtattaaattacagcttgttgtcaagtcagtgtttctgtaagacagtatatccaatattggttagagtaacacctatttggtgatacagatcaacagggtgtctctgattaatttagctcctacatagccagaagcaagttcattatgacttagaatattgtacatggttatgcaggaatcatcccaacctatctgtgtttataggtcagatgatgttcagtttatatctgctgatagtgtatatgcaggaaaacctataaaaccacttcagacttgttaaaacagtgagaaagccgtgattgaaatattaatacaactgtgtggtataaattttcatttacaatggaatgtaaatgctgtcatttgaatcttgtcaaagcctgctactaaaactctgaaataccttgtctagggaataagtcttcagtccagaaacaatatagatgtgatgtgtgtgattatacaagtacaacatatgttggtgtcagaaaccacaggcgaatccataactctgataagccgtacaggtaagtgttatgattctagaattttaatgtttgtattaaaatattttatattaaagaaataaaatgaaataaaaatgtatagcacttactgaaacacaggttaagaagtaagaaattttcactaattggttttatattttgttgttttatatatttacttatttattttttgagtcagtgtcttgctgtattgcccaggctggagtgcagtggtatgatcacagctcactgcagcctcgaactcctggcctcaagggatcctcccacatcagcctcccaaagtgctgggattgcaggcgtgagccactgcacctggctggtattatgtcttgtttgatttgttaagatgtgaactttaagcttgaatcttaggacagtaggcattttgtctagttgatacataggaaattgtctttatctgtcaattttatgttttcatttcatatgggtataaatttcatagcaattttcaatgccttagagttcatttcagtaatttggcagtaaggtactcagtattcagcaaaagatccttaaaacttaaaggcaataaaattttctatgaaagagtccatttttcaaaattaagctagtatgtgtagaataagtcatttaatttcgttacttgatttttcccaaaagcaaattcagatatatatttcagaaaatataggcattctcagtgatagtgctaggcaatgcgcatgaactttcacccccttgtcaaaacttagcaggtttaactctctccccagattctgtagatatgatacaagtgagtgtgggaaagttattgtattaatctcaatgaaaacctgacagattgtgccataaaaggtcattgtttaatcccaaagtgtggtgatctgtgtatggtttcgaatatttaatatgtgcttaatttgcaaaccagcagacttacttataatcactcttcagaaagtacatctgtttgcagagtcttaaaactctgtggaaggtgtttgaccttgcctcagtcctcctcagtgtcttccttccttccttctttccttccttccttcttttcttccttccttcctttccttccttcctttccttcctttccttccttcctttcctttcttcctttccttcctttcctttccttcctttccttttcttccctccctccctctctccctccctccttccttcctttccttccttcgtttccttccttcctttcctttcttcctttcctttcttcctttccttccttcctttccttcctttcctttccctcccctccctccctccctccctccttccttccttccttccttcctttttttctttgacagagtctcgctctgtcatcacccaggctggagtgcagtggagtgatctcacctcacggcaacctccgcctcccgggttcaagtgattctcatgcctcagcctcccaagtagctgggaccacaggcatgtgccatgattagctaattagagacggggtttcgccaggtcttgaactcctggcctcaagtgtccgcccaccttggcctcccaaagtgctgggattacatggttacaccatgtccaatcagtctatttaataggtgggactgagtatatttacattcgtgatttatactgggaaatgtttaggagaatgtgatggaaacagggaacactagtttacctgataggaggagaaagctttgcctttatatttttggtatccttgaatttagacataccgtgccagattcatgtgatttaagtaagaagaaaataacatttctccgggtccagaattagattgttctttcattcatggagaaatatttattgagcaaatattatgcttcaggggccgtgctagattcttggactacagtcataacaaaacagacgtcatctttgctgtcatggaacttgtagacaaacaataagcaagtaaaccctcaaatacttaggaaaaaggttagcgattctagttctgttgaaggttttacatctgctttattagatcagtcttgcagcttaaagattcattttgatagctgtcagtgtctcagggatgttttcttgtgttcttaaaatattcacagattcataggattcattgcagttgtcctagggtcttcctaccaacgggcaacatcccgtgagcatcctctttgtgtaacatcagagaactctcagtctgttattttccaaatttattcacactccactttgtcactgggtttggtgtggttatgccttagatacagttttgtcatatctccctctttgtacttattatcagtttttcctcataagtcttattttctaatgtcatggctctccttttaactttctttaaatactcaccatcctttgccttcatgggatttctggtcgcagagcattacggattaacatgttctattccaggatgtttctaggactttctcctcgttgtcctatactgtgtgctttaagcggagctggtagcgtagcctttataatgtctgacttaattcaaggatcacaggagtttctctggctcatttcatgtctgcttcattcagtttcgttgcctggtgcacttatggtcagagtttgggcttggtttctcagagttcatgccatatcctatgcatttctgattccctacattttgttaagaaacatgctcacaggcagcagtaatgagttcttaaagagctacaaggccttgttgcacaacttctaaactttgcacaagggcacaaaagatttattgtttattttagtgtgcctattacataacaagttttctgtagtggtgaaacctgttcctttctcgtgcttttgctttttatgctgtcattccagtccttcaatgaccccatccttgtggtctgggcagtacggcttcatggatccctggttctgggggcagatagtcctgggattgaatctgagctctcccacttgtgagatttgtgatcttgcgcaaactgtttcacctctctgtgctgcttttgtcgttaatagaatgaggatattaaggttgtgagggtgaaataaaatacctaaggtaccagcacataataaacagccagtaagtggtagctggtagttactgggcccagcttttatcttctcaataattcattatctaaccaaagaaaagtactaaaaggctgatgacctctaaacactagggaaacaaagaagaattaattctgtgccagggtaggcaggcagagctcattttacaaaagagatgctgggcccaggcagagtgctgtccctgctgaggtccccatgctatgtctggctgctctggagtcactctagtatcttgggagcatcacaggcctggaccacacagtttctgtgccccactggggaccttgggaatgttatgccatactaagcctcttttcccatacgaaactcgggagaatacttccccgctcataaggctttgtgaagattaggtgagattatatttatgaagtacccagcatgttacttggtgcattgaaggggcttgttcccattttctgctcatgaagttgtcagattatctcagaagccctgttcttacccagaaaaaaagagagctgttttccattcctgtggaaggacagggaaagattaaaatgacatcattctatcccagtgcctaccaatgcagctattaataactttgttcttactctgtgtaaaccatacaccaattatagttatacctgacatttctttttttttcttttttaaattttatttttccataagttgttgaggtacaggtggtgtttggttacatgagtaagttcttcagtggtaatttgtgagaacctggtgcatccatcacccgagcagtatacacagcaccatatttgttgtcttttatccctcgccctcctcccactctttccccccaagtccccaaagccattttatcattcttatgcctttgcgtcctcatagcttagctcccacgtatcagtgagaacatacgatgtttggttttccattcctgagttacttcacttagaataatagtctctaatctcatccaggtcactgcaaatgctgttaattcattcctttttatggctgagtagtattcaatcatatatatatatctccgagttctttatccactcgttgattgatgggcatttgggttggttccacgattttgctattgtgaattgtgctgctataaacttgcgcgtgcaagcatctttttccaataatgacttcttttcctgggattgctggatcaaatggtagttctacttttagttctttaaggaatctctacactgttccatagtggctgtactagtttgcattcccaccaaccgtgtagaagtgttccttatcgccacatccacaccaacatctactgtttattgattctttgattatggccattcttacaggagtaaggtggtatcacactgtggttttgatttgcatttccctgatcattagtgatgttgcatttgatttgcatttccctgatcgttaatgattttttcatatgtttgttggccatttgcgtatcttcttttgagaattgtctatttatgtccttagcccactttttgatgggattgattgtttttttcctactgatttgtttgagttcattgtagattctggatattagtcctttgtcagatgtatagattgtgaagattttcacccactctgggttgtctgtgtactctgctgactgttccttttgctttgccaaagctctttaattagatacagctatttatctttgtttttattgcaattgcttttggggttttggtcatgaaatccttgcctacgccagtgtctagaagggtttttccaatgttatcttctagaatttttgtagtttcaggtcttaggtttaagtccttaatccatcttgagttgatttttgtataaggtgagagattatacctgacatttataacattggccccaaagttttactgaaaagttccactcaaaatttttcatattagatggtccttggtttagttcaatattgcactgctggacctgccctgatttacatctcccagtaccacttttgtagagaacaagatgggagaacaaaacattgtcctaagagtatcagtttctttttaaccataaggcatggaacccattttcccttagaaatacaactgtactgtgcttaggttctgaaactgtactgtggcagggggacagcatgatgtcaagggaagtacatgggctttgggctcaagtactccacacactgcccgggacatagtaggtgctcggtaaatgttgactgatagttgtccatatccctcagttcttcccatctataaaatgggtctgattctataagctttttgtgtaagtttaatttgtgcttgaaaataaatgtgtagtggtattattacgccttttcttccttaagtagaatagctgcccaaataatataagatgaattttttttaatacccagtccaaaaatacccattttcccctaattgtttcaaaacatacttttggaggtagctttttcatattgagaaccaaacaaggtccagccgctctattaagagagtatcttaagtctctctctccctccctccctctaaattttttaaatagattttataattgatgttaccatgcctcctgaaaattgcataaatcataaaggtacagctgatgaataatcacaaattaaactcatgcttgtaacacaaaccattatgagctcttcagcagcaccccttcgtgggccttccagtcattacccacccctcccctctgtctggtatccactatcttgacttctaacattatcaattagtgttttctgtttctgaacttaataaaaatggaatcatacagtacatattctactttatgttcagatttttttgctcaacgtgtgtgtatgtgtgtgtctgtatagttccacctagcagaattgcatttcattgttacatagtattccactgttaagaccaccgcaatttattcattgttctgtgaatagacatttgagttattgtaaggttttcctccctgatatgatctgataccattttaacattcttttacatgtttttgggcacatatatgaaatgagtccatttccattgggtttatacctaggggtggaatttcttggtaattggacatgtatatgtattcagctttggtagacagtgtcaacagttttccaaaatggttgtacctattcacatcctcaccagcactttgtgttgtcagtctttaatctttattgttttggtagatgtatagcagtgtattactgtgcttttgtttgcatttccctgataatttctgagtttgagcatcttttcatttgtttatgggctattattgcccacttcttttttgcattgtctattgtattagtttggcattgttataagggaatacctgaggctgggtaatttataaagaagaggtttatttggcttatggttctgcaggctgtcctctgcttctggtgagggtctcaggaggcttccagtcatgacagaggtgaagcgggagcagatatgtcacattgtgagacatggagcaagagagaggggaggaggtacaggctcttcttaacagtcagatcttgcagtaacagacagagaactcattattcatgaatggctacaccaagccattcgtaagggatccatccccatgacccagtcgcctctgcccaggctttacctccaacattggggatcaaatttcgacatgagatttgaaaggacaaatatccaaactgtatcatcggctgttttcttactgatttgcaggagctcttcatgtattctgagtacaaggcctttgtggggcgtattgcagatgtcatctaactgtggcttgcctttctactttcttaatgatgtcttttgatgaacagacatttccagtttaatatagtcaaatgtattaatctttttctttgtgtttaggacttttgtgttcttatattctgaaactagttttgattttttgaaatagtctgttgagtaaggtagacgatgatacagaaataaaaatgtgtgctgattttcagggatggcacatcaactatgcgtgcttaggtattactgagcctcatttactaatatggcactaaagctaaaaaaatctaaacagaaaacattccagaaaggctttcagcagggggaatgacagtttggaatggaaatgataaggttgtctctcagtgtagtcagttattgtatgggatttgtataaatagaagtatattagaaatgatgataatagctgatatttttgagaagattgtttgtgggccagacccggtgtgctaagcattcaatacgtgtcagttcagtcctcacagcagcccagtacttaggaatattactaccccaattttgtagacatggaaacagaggctgggctagcttaaataactttccccatgtctcagagccggggcctgaactcttgctcctaataactgtgtcatcctgcctgtctgtgctacaccagggagatctctttatgaagtgtactgctgctgcatgccagcagcccacaccaaatcagggtgtgaaacagaagcaatttcattatgctcagggattctgtgggtcggtcaggaatttggaaaggacgcagtagagatggcttgtcccatacagtctggggtctcatcagggaaggcttgaaggctggaagtgacccagacagctagggtgacagtcctctgaatgctgcctcagcataggctggtggctgtgctggctgttggttgggcatcagctggaacacatacatgatttctccttgtggactttgcaggtctgctagtccccaaaatgagcttcttagataagaagtaggcaaaagctctgttgccttttatgacctaaccttggcagtcacagcccatcacttccaccagagttacaggcttcagtcttttttcatctgtaggcatcgtgattctttagtcaatgtgttggcttagggaaaaacttaagtctttagaaagcttcaatttgtttaaggaaaatagtgaaggagatagttttatcaggaggaaaaaatatatattttgttttgaagagatgaactgaaagagtttgtttttctcagtggcataaagatctctcaggttcatcacaaaatttgaagtggctgttttgtgggggccttagttatttctttaaaagcatagaaaatgaattgaaggtcataagataagctctattgcaaaatttctattgaaatcgttgtttatgtgttcaaaccagactcaggtcaccccaaatcttgtaggacatccatctgcttttttccatctaagccctcaaggcagttgacctggaaactaaccttggtcccaggccaggaaagtggggggttttaaaccaacatccttatctccttggggttctgagaccgaagtaactgacttagtaacagttggagagtctgtagaaaaattcagtctcaggctttttagccaagttataagaagccttgggtttctacattggctttctttgggttgccaaagtagcttctttgcattgggaagaaatcattttttatacagatacaggttgggtgttattggttaacatagaaattgtgctgctttggacattccaaagcctggatctagcaatggccatatttacaggccactctaggagtccagcaatcacactgttagggtgttcacttctttccccatgtcatgtgtatgactttgccttggtagacttgaataattgagtcccaaatggctctgtcatcaggagcatccagcaattccaccaaggaagcaaagcagaatcgtgacaggtggtgtcatgatcagtgtgctcttttgtcatgtggtttcgttttggtttaagactttttttggccaatggatgggttgggataggaaggagcagtttaccctacgtggaaatatgattgttgctggtctgttggtgaggtggttagaaatgatttgttagacatagcctctgtttcaaaacatactttcttttttttttgttttgttttttaatacatgttattgtatatattggaggttaacaatatgatgtataagatgtagatagtaaaatggttactatagtgaagcaaatcagcatatctatcatcttacgtacttttttgtggcaaaagcagttaaaatctacttatttaacaaaaatt

SEQ ID NO: 437 - DNA, 5546 bp, Homo sapiens
ggatgaggagggggaaaccgggggaaaagagggaaaagagccgggagagaggtgggcaaggacgagggcgagggcacggccgggtcctggctggccaaacgaggctcgcggaagcagcagccgccgcctgaccgcagctggattttgaagattgatccaagggactgtattaatttcaggaattgatttgaaagacactggctctgccacttaacagccatgtaaccttggatatggaagaaagtagcagtgttgccatgttggtgccagatattggggaacaggaagctatactgactgctgaaagtatcatcagtccttcattggaaattgatgaacaaagaaaaactaaaccagatccattaatccatgttatccagaagttaagcaagatagtggaaaatgaaaagtcacaaaaatgtcttttaattgggaagaaacgcccacgttcaagtgctgcaacacactctcttgaaacccaagaactttgtgagattccggctaaagtaatccagtcacctgctgctgatactagaagggctgagatgtcacaaacaaattttacccctgacactcttgcccagaatgaagggaaggctatgtcttatcagtgtagcctttgtaagtttctatcatcatccttttccgtgttaaaagatcatattaagcaacatggtcagcaaaatgaagtgatactgatgtgctcagagtgccatattacatctagaagccaggaggaacttgaagcccacgtggtgaatgaccatgacaatgatgccaatatccacacccaatccaaagcccaacagtgcgtaagcccctccagctctttgtgtcggaaaaccacagaaagaaatgaaaccattccagatatcccagtaagtgtggacaatctacagactcatactgtccaaactgcatctgtggcagaaatgggtaggaggaaatggtatgcatacgaacagtacggcatgtatcgatgcttgttttgtagttatacttgtggccagcagagaatgttgaaaacacacgcttggaaacatgctggggaggttgattgctcctatccaatctttgaaaatgaaaatgaacccctaggcctgctggattcttcagcagctgctgcgcctggtggggtcgatgcagtcgtcattgctattggagagagtgaactgagtatccacaatgggccatcagtgcaagtgcagatttgcagctcagaacagttatcatcttcatctcctttagaacagagtgcagaaagaggagtacacctaagtcagtcagttaccctggaccccaatgaggaagaaatgctagaagtgatttctgatgcagaggagaatctgattcctgatagcctgcttacatcagcacagaaaatcatcagcagcagccccaataaaaaagggcatgttaacgtgatagtggagcgattgccaagtgctgaagaaaccctttcacagaagcgcttcctcatgaacactgaaatggaagaagggaaggacctgagcctgacagaagctcagattgggcgcgaaggaatggatgatgtttatcgtgctgataaatgtactgttgatattgggggattgatcataggctggagcagttcagagaaaaaagacgagttaatgaataaaggcctggctactgatgagaatgccccaccaggccggagaaggacaaattctgagtctcttcgattacactcattagctgcagaagcccttgtcacaatgcctataagagctgcagagttgacaagagccaacctggggcactatggagatataaaccttttagatccagatactagtcaaaggcaagtagatagtacattggcagcgtactcaaaaatgatgtcgccacttaaaaactcttcagatggattaactagtcttaaccaaagcaactccaccttggtagcactcccagagggtaggcaggaattgtcagatgggcaggttaagacaggcatcagcatgtccttactcaccgtcattgaaaaattgagagaaaggacagaccaaaacgcttcagacgatgacattttgaaagagttgcaggacaacgcccagtgccaacccaacagcgatacaagtttgtccggaaacaatgtggtggaatacatcccgaatgctgaacgaccctaccgttgccgcctgtgtcactacacaagtggcaacaagggctacatcaagcagcacttacgagtccatcgacagagacagccttatcagtgtcctatctgcgagcacatagcggacaacagcaaagatttggagagtcacatgatccaccactgtaagacaagaatataccagtgcaagcagtgtgaagaatccttccattataagagtcaattgaggaaccatgagagagaacagcacagtcttccagataccttgtcaatagcaacttctaatgagccaagaatttccagtgatacagctgatggaaaatgtgtccaggaaggtatctatgtattttgttatgcaggctgcagtgacttgcacatgacataaaagtgcccttagttgtcatggttggttattttcagggcaaaagcctatattctcctccatttttgtaccatggatgtgagtgaatctgatctctgtttctgaggaaatgccaagtactgaatgaagcagatgattactaggtcctaggtgagaagccctagatagtaaggattcatcttcagttgaaacttaagagccccttagaaggtgatgtaccagcaagccagaaaagcaagccagaaaagctacaacatggaaaacaggcctcccctccctctctcggcaccagttgacctactgagaacagagcttttgcagatggtaggcccccaccccaaactttaactggggctccccgctgtgatcttattcttacccaagtatgactgccagatttcatctgcattattaaaaaaaaaaaagcacacacacagacacacaagatctttttatgtactagttaagtagcagtcaaccgagtttctggtaataagaatattagaatcaaaagatttaattagagctccatgaaaaggcggatgccacatccggagaattaaggataaagtgtactaagctgtgccgctttggttcagctcacttaaattgatatactttaaatgtctccagtgtggcacataatgtttatgggagataagacatattggggtgactttcccttttagatttgctaagaattaaagttagaaacgactacagagtgaaatgttttaccataatgtttcattaaattataccccagaaagcataactgattctagaatgcttctgaaagaactgattttgacaccactgtagcaccaaaattctcatgtcaaacagatgtcatccctgtaaaactctctgaaacaaaaggagtttatgatatagcatctgtttttgcagtagatggctgagctaaaacagttttgtttcctttttacaaaatagccctaaatgcctccttttattttaattcattatgtttccatatcccctttaaaggagacattaaaacgtctgatatgattggaccataaatccctaatgaaaggatgaagtaaatactactcagtagcaccacctgcagttaatatcagtgttggaagatgtcttttttagcaccgtcctaaaaagcaaacatttcaaactgtccaaatgagttaacattaaaattcacaattttaataaaaagattaaagtgtcagctcaaaattaaaataaccacttcagactttacagtattaatgaatgtttactagattttatgttgcagcatcttttctttgtggctcatgctttttttttagggttacatgcatggatttttaaattgcctgccatgcctcttttcctccacctggctccatttgcttttttctctcagtactgtagcagttcaaatggctgcatacttatacctggatgggtactttattaactcaatattagatattttgaaatctggttgtcaggccaaagaaaaaatttttagctcacaaataaggtaataataattcatgctttgttaaaacttctttacctatttagtaaacttgttaaacaagaagagagatttgtgcctctgtgatcctcagtctctgccattcagatagcacagataccttagggcatgtttcagcttaacatttgcttggccaaaaggcatggcctgcctgtcttgagctagatactgtgttaggtgctgggagtacagtgaaaggcatcactgcccttcaggaatccaactcagtgaagaagacagaacgaggctgatgggtatgtcagcagataccgcaggagctcaaatagagccgcaagcaaagccctttcgtatggtgttactccatgaaacctaattaaattgttttttattggaaacctataatttgccaagcgctggggattcagtctaaacaaaacaagcagatccttatcctcagggaatagacagcttagtggcagggcagagattttacccagacatgcaggtaaagtacagactttgctaaaggaaaaatataggacttattaaactatgctgtgaggttctagcatttccaatttgtagatgagaaaactgagacttcaagaggcaaaataatttacccatgatcatactggtagaaagtggcagagcgaggactaagcccaagtttttgaactttaaatccaatattctttccattggaaacagttgcttgaagtagcacaggctctcattctgtgctatattaagtttttccatctgtcagttttattagttgtcattgatctgtaatatttctcacacaaaaccattatccaatatttcacacttcattttttagggtttttttaaaactgtatttggaacagtgccatttataatcaagtccaagtttttaacctaccaattaagagcaatacttagattataattatgattagtgtgtatattaacgttatagatttataccaggaaattaggacattttgttctgcttggcagtagttattagcaaaagaaaatttcaattttagaaaccgtaaatttaacttaaggattttctttgttgaaatttcagtgtgggttttcctttgtataataccacggattttacttttatgcggtgtatacaggtgttctacctaagctttcttcctgccaagagacacacagttcttcctgctctgcctttttcatgagcttccatgcttgctttgtttctgaatataaagcagagtgtgaatagcctgtggactgtatgctgacagacaagtacatgaagcgttgaatatcttcaagaaatcgttttatatgatcaagtcactcaactcgtgttgacataagcttaccccaacttgaattactcagccctgttgttgcagagtgagtttagtaacatggctacttttcgttggatccatgtctcctgcgtttcggagagctgcatattcatgtcagtcataacctttgtccctgtaacctgtcagttaactagaaagaattatacattgcatagcacttaaaaattt

SEQ ID NO: 438 - protein, 762 aa, Homo sapiens
MEESSSVAMLVPDIGEQEAILTAESIISPSLEIDEQRKTKPDPLIHVIQKLSKIVENEKSQKCLLIGKKRPRSSAATHSLETQELCEIPAKVIQSPAADTRRAEMSQTNFTPDTLAQNEGKAMSYQCSLCKFLSSSFSVLKDHIKQHGQQNEVILMCSECHITSRSQEELEAHVVNDHDNDANIHTQSKAQQCVSPSSSLCRKTTERNETIPDIPVSVDNLQTHTVQTASVAEMGRRKWYAYEQYGMYRCLFCSYTCGQQRMLKTHAWKHAGEVDCSYPIFENENEPLGLLDSSAAAAPGGVDAVVIAIGESELSIHNGPSVQVQICSSEQLSSSSPLEQSAERGVHLSQSVTLDPNEEEMLEVISDAEENLIPDSLLTSAQKIISSSPNKKGHVNVIVERLPSAEETLSQKRFLMNTEMEEGKDLSLTEAQIGREGMDDVYRADKCTVDIGGLIIGWSSSEKKDELMNKGLATDENAPPGRRRTNSESLRLHSLAAEALVTMPIRAAELTRANLGHYGDINLLDPDTSQRQVDSTLAAYSKMMSPLKNSSDGLTSLNQSNSTLVPEGRQELSDGQVKTGISMSLLTVIEKLRERTDQNASDDDILKELQDNAQCQPNSDTSLSGNNVVEYIPNAERPYRCRLCHYTSGNKGYIKQHLRVHRQRQPYQCPICEHIADNSKDLESHMIHHCKTRIYQCKQCEESFHYKSQLRNHEREQHSLPDTLSIATSNEPRISSDTADGKCVQEGIYVFCYAGCSDLHMT

SEQ ID NO: 439 - DNA, 163701 bp, Mus musculus
  misc_feature (1)...(163701): n = A,T,C or G
agcacgaaaacgcaagggatccaatcagaaatcatttatttgaatatcttcatgctaactgtagaatgtttcagtagtactttggatttttacaaaggatgtatgtatgtatgtatgtatgtatgtatgtatatgcctgtgtgagttcatataccatgtgcatgtaagagcctgtgaaggtcagaagagggtgccccatcctctgaaactagagtcacaggaagtttgcaaggtactatgttggttctgggaatctaacccaagttctctgcaagagcagtaagcactcttaaccaccaagtcacctgtagccccaatacttagtatttttaagacaattccctggacgcagcttcaaattcacaggtgtggaatgaggaaggctgttttccaggatctgcgaatcctgccggagtagcgggatgtgtgtggtaaaaccctttgcttactcccatgaccatcagtcagcatgtagacaggtcgttagagacacaacccactgctgagatatacagataccctcctgtatctggagatagcagtgccttagatgttctgttaatctgagctgtaaacaggtatcacaggtacttgataatgcaatactgagttctgctaccaactctctcaccctgggcactgcgcattttcaatgcacgcatgagttatttggagggagcatcagatccttctagttagacagcattcacaacagacaccagctacaagcagggaccctaacctacctgctcttcggtctgactttggctataatttggggggtttctgtgagcctacttcatgttactactcagagcatgcaagatactgaaggcggagtctcagtcctgtggagtctagcacatcattcttgagtacgtccatttatccacaagccaagaagctcctctaagacagtgtcctgaggtttccgttgttctgaagctatgtgcctgcatcgtaagtcactggaaatgtgacttagctacatctccagatccagcacccctccccaggggttggaggtgaggctgaaagtctcggccttctaatcacatggcacatctcattagtaccccaagggatcaattatgaacagcacaagctattcctgtcccccaggaaagcctaacggttttgaaccagagcctgaaaccagagacaaagtctggaaatatgctttattacatcacatgtatataaatcgtcttctgactgctgcatagcattcacaattcctttccagtcacatcttttataaacattaattgtgcaatgttgtatgtgtgtgtgtgtacatgcatgtgtgtgtgtgtgcatgcatgtgtgtgtgtgtgggtgcatgcctgtcttgcatgaattaggcaatgggaagagaactgcattcgctgggatactttgcatttctttggtactaattgttccatttccttccacccactacccagcacgtcccttattctccagcctgcacattagcgaaagcttgtctctttagccaaccaattgttcctgctgcatcaatcaggtgatagagttggtctaatcagtggtcacagcttgccacaatatagctgggggtcccttacctgagcaggggactgactataagcaggacagaaagacagaagcatagggaaagacagacacagttctcaggtgttcgtctcaggtagcttgctaaggaaggccctgtagcagaagagtgtggttaagttcctgctgagctgtctctttggctcctatagatcattcctttctccagagacctagccctctcccaactctgggttcaatcttgtccactgtccctcagtgctaaaatactgattatcctttgcttggagttcaatataaaataaatcttcatgtcaatctgcataccttctacccacttgtagtaattagattttgagtttttctctggaaacccagccttaccctataactccaatgcagtgagcacttgatgatctgcacagctctgcataccaaataggatctgagagtgagctggctttaacattttttctccttccctttcccaaatcttatactttggttcacaccaaaaatgatcacagtcaggaccatcatgacgattataatggatgaagtgaccagatagttaaggagtacaggtaccaagaagtgtgaaatataatacctaacactatgacatataacacagacatgttatgtttactgagctgctgagctgtgcatgcatgtgcacacacacacacacacacacacacacacacacacacacacacaggacatctctaatacagagcagtgtagggatgtattacttggtaagagacagttggtagcatggacataaagaagagaggagtccctggtagcatgaccaaggtcgacttcacgtgcctgaggagctatgaatcaggtgttacggtagggttagcttttgaagaacataaatcagaggagagcttggattaaaaagccagcaaaacctcaaagcaagaaaggacaatggatatggaaacaagaatgagagtttagacaaagaagatctgggaataggacaggatgcaagctattctactgtcagcatccctttcattactgggataagacagctggcaaagcagcttaaaaggaagagagatttgttcctttttggtgtggtttcagaagttttggtccatggtccttggcttccttgattctagaaccaagatgagacaaaacatcatggtggtaggatcctgtggaagagattattcacatcatgtaggacaggagtcggtgggggtccagaaaccaggtaacctttgaagatattccacaccaccttccaatgccctacttcgttcagctaagcccagttcccgaactttctaacatctcccaaaatagcaccacagagggggccaagtattcaacacaagtacctacctgtggggcatccaatattcaaattgtggcatccatatgcctaacagctactttaattgagaaggacagttgtgtatttttagagggggaaaaaagctaacatggacaaagcaagctattatgagattgtttaaaattggcttcaaaatggaatagtacagtaatttcttttttcttaagttactgaattttgttggatactgaacatttcttgaataagtgactgggaatgtgtcaataaaagagaaaaatcattttaaatagctgttatgctggctctacaatcgaaaacaatgtctattagactcagctgtttccttgtacattcaaacaaaacagctcctatgctctcttcttttctcacaaaagaaactgggctcccagggctggagacagctggccagcatctttctgcctacgccacatgcgtcctgggctctgcagactgttaccaacaccaacatctggctctgctagcttgcttgctttaaacagaatttcattttcctgtttccagaaacaggaaataccatgtgcttttcagtggaattcgggattaaatatttctaaaagcaactgctgtctttacaagacattttagagtgatagtttattttacagctttttgcccttgggaattatttctatgggaactgttgtgaaatttccaaggccccttgttcttctataagactggtcttgtgctcttattttccccttgggacatgggtgagaatccactgaagatctgactaccaactaccaagtaacacttgcagtgccagctttgttacctatttattcagaacagtaggtagttgttgttactgctcattgtttcttcaagcccagggaccttgtacatgctaagccagcacttgaacacttcactgaacccagaatggtaggaaccacggccaagtgtatggatgcaggaacttcactcaagcagaagagagccatacaaacaatgcatatccttttctatctaaagcataattcagactacatgctactgcccctcctttcccccgaccctgccatcttttgtgctttgtagcaggagctagcctgcactgcagagatggtacagaactgagggtagaagatactgttcacaggaaaagacccaaagggtagggcttaagaaaaacagaaatgaatcatccactatacgttcttgtaactagagtgctcatttactgcataaaccaggcatgatgaacaagaacatgcatgtggtttcagcccttgggagatagaagccaactgatccagagttcacggtcacccttgaatacatggagagtttcaggccattctgaaacctaccttctgattcttggcttagtatattatactaaagtgatcgttgctgaatagtgtgaaactgagccttctctgcacattggctttgcattaagcttgagtgcttgaccccaggagagaaacataaggaatgcgtgagatagggtagctcaggacaatgggaatacccgtaacagaaagacagttttgaaaaggctctgttttcacctttggaaagcctgtctcttgctgtcctaagttttcttcttcccaatagaaagtatgaaatccttaagccctgcctttttctctgcagggcagcgtgagatcactaagttcctttagcaggaggctttctcctcacctcccctgagcatctttccactaccttcacctgctctcatctgcctacagacacaataaactaccttagatcttagcacttgcattactggaactccacaggtttcctatgctagggcaagacactgagcttttcacaagtttacaaaagtttcttgggaaacaggaaagacttgagcccagttagggattcagctacggtcttcaatgacactgtctgccaccttatgtgatccaaccatacaaacgtgacaatcaactgtgtcaaaaatctagcacaatatatacatcttgtgcgcgctcgactggccaggaagaacgacgctgcaacaggatccttctgcacacgtttattgggtgagcttgattgtagaggcgaaaagaccccgagcccagaactggtgctgcttttataggtctaggagaggcgtgtcttacacccggattggttatgcactacgcctcatttgcatgttcctcatctgattggctactctctctcagtacctcacagagcctcattatcatacctcatttgcatgtctcacatctgattggttatactctcagtaccttacagaacctcattatcatgcccgggccaggcagtatctttgcaaaaaactttactgcatatgtacacattggttgtttgtccaaacttatgcgtggtggccagcagtagtcagtgccactctgcaacggcacatgtggcttcccacatatatagagttttctagcaagctttccactgagctgtatctgattgctttgcttccaattctgtctcagcctctcccataaccctgagttctgccaattccctcatctgagttgtctctgtatggtaagcaagcctggagattcttatgtccaagaaaccatttgagtgaaaaggatcaagaatgtaattaataagggtgaagaactttccaaccaagattccttagctcagtgatcgtcctgtgattcttagcagaaatagtttaatttaaaggaagggataggaaatttattctagacagagctccttgaaaggagaaagaatagattgctagtgtctgtaattgaaaatttcatgagtgacatttttagggtcattggatgaagaaattctcaaagagcaagctgtgctggcccatgaagaatacaagtcagagagagagagagagagagagagagagagagagagagagagagagagaaaatatatctgttatttttaccacagaacaacagcacctaacaagaaataaattcaaaatgcagacatagtcaatattaagattcaatcaatgctaggacaatattacatgtttcatcttttaaacatcaataacagtggctcggaatggcagtgggacatactaattaattttttataaaattgagccatagattacttgaagtcaataaatgctacacagataactattttcgatggagttgctggagccgtggaagcctagaagagctgtgatggttaacttctttgtcagcttacaggattgagaatcgcccaagagaaacctctctactgggatctacgacaagcttctacagagcttaaaccaaggacaaaagaactaccctgcggcaagtggctccaggttagagtcccagagtaaatataaatggaaaaagaaaagaaacaagagggggggggggagaaaagaaagctgaataccagaacacatctctcctgttttctgtctctgagtgcaacatgatcagctagctgtcttatgccctctgcaccatgagagatcgtaccctcaaacaacgatttcctaagttgcttttgtctgttattttattatagcaacaagaaaagtatcaaacaccagttctttatttaaaagtcccgatgtaatttattctactagcttttttttaaattaagatactcttacaaaacaaacaaacaaacaaactgtaccaggggctggagagacggcttcatggatgagagtatatactactttttcaaaggacccaggttcaattcccagcacccacatccagcaactcacaactgcctgtgttgccagttctagggatctagtgctctctttagggcatctgagacagctacacgtgcacacatgtcacacagcacacccacatataaaggaataagtaagtcattagaaaatactcaaccaaatttactatgatggagcagatccctcattttaaatgaattcgtttttgtgaactcattcgtttctaatttataatcaaaagagactatatatacagttgagagaggttaacctctgtagaataatatataaatacacacttgcttccaaaacttcacacacagggagtgctatctatgcattaactaataaagatcgtctttgaaacacgtgtgagttctcattggatgattgcagatcctgatctgagcaatttggaaatggaaatgaatctctagtgtgtcgtttggtaaagggagcttgggaaagagactgaatcagtgatttctcctcgttcactcttcctgtgtgaaatgaggatggtaattgcacttgtccccagagagtgtgaatgttgcccttctaaatccctggcaatcttgtgtaggtaactgcaggattctgatgctctggaaaccactttgtgcagccctaattcaagaagctgcaaagtgggatggagacaagagacatacttcttccttagaaaaaatgaaagccttcctaactcaaaaagttcgcaatgtgtttttcttcgttagggttttactgctgtgaccaaggcaccttttataaggacaacatttaattggggctgactcatgggttcagaggttcagtccattatcatcaaggtgggaacatggcagcatccaggcaggcatggcgctggaggagctgagagttctacatcttcatatgaaggctgctagcagaatattggcttccaggaagttagaagtaaggtattaaagcccacaaccacagtgacacacctattccagcaaggccacacctcctaataatgccaccaacctgggcagagcatattcaaaccatcacagtctctcaaactatgtggaaagtattgcagagttttctttataagattccagtcatttcctgttacctgaagcttgctcacaccggagccagagcatggcgtacctgctcagtgggcgttctcttcttggtgcttattctttgacttgattgctgtgtgtgtgacatatgtgcatatacatgatcatgtgtgtgcatgagcacacatggagagcccagagtttgatagtgggtgctttcctcaattgctctgcacctcatttttgagtcaggatctttcactgaacctggatgtccctgattgagcctggtccccaagtcccactgatcgctccatctccacacccccagatctgaaatagcagatgtggcttcaacatctggctttgtaagtggtccctttctagggatcccaatccaggtcctcttgtgtgtgcagcaagcactgcatcaactaagccccacagaatgcatttttttaagagcaaaaaatagatacaataacttcctatatctaatttagaagatcattgtgggattcaatgaggtaagtcattgtggtggttaatcttgtcagctttacaggacttggtgtgtcttagggaaaggtgttcccagagaggcttatctgaggaggggaggctcttgctgcccttgggcagtgccatagcatggactgggatattggaataaaaaggactaaacacctctcatccatcccgactgtcaatgccgtgtgaccgacttcctcacgctgctgccttctgcgccatggtagactggaccctcaaagcatggctcgaaccaaagccttcattccctgagtcgctgctgttgccaaacattttgtcacagcaatgagaaaagtcactagtacagcctggtggtgaaatccagacctttataagttctcaaaccaacgaacctctcaccgtcctctaaatccagccaagttggatcctgcatccttattctcaaagtacctttccaagctgaagactgagtttaatatctcctacacatcctcctctgcaacgtattaacattcctttctcctttactcaactccctattcccacccctttgctcctaatgagccgtttttatccagccaacttcacactacctgagtgaatgtgtgtatgtttaatatcactcgtgcctgttcttccccattagagaaaacaaatgaacttgtcagacaaataactgtttggtttagagttcagtggacttggctcagaagtcctgagtgtcacatctggactggttatttgtttccacactgtctatccccatttccgggttgcttgtttaataagttaaaattcaaggccaacaaaacccttgtcagatttatctgcagcttgttccaggcaatattcgagtcctccccaccccaccccactcccccacacaatctcccctcccactccctcccccagtgcccagtgggtgaacccgaaccatagtggatacgccttggaaattccaaattaaaagcattttcacctgattctcaggcagacccacacgccagtagctgctctggggtctctgtcctcgtaagtggcaaggaagaacagggtgtgggaggcttgcagccctggaatagtcttggaccctattggaatagggattccccatcctccagaccttctgaatgtgcgtaggcaagtgttgtattaccatacaaccagcacattctcttggggagctttgggcaaggctatttacaacctacatacctgggccccacctctcagagtctcctgtgtttactttggagtccagccaggacaaagggctcctacaagctcctcaagttcttactctgcatcagatcaaagtgaaaggtgtcctgcaaattgcagtccttgaaggttaagcaaccatctgggttaaacttgacctttgcaggctgtcctgggaccctaaggcagttccccatagactgcttcttaagggacaatgggctaaggagacaacctcagtcacagagtttttggtcaccagccctgattttgcgaagctccagctccttgccctgcagctggcagccacattagcctcgcagcaacccccccccgaccccgccccacccttctcgctccgcccaaccccgcccgttggcaccgcccccgtgacgtgccgcagcagtcgcgaacatgcgcactgagtcccgcgcgctgctccgcctcggcgctgtcattctccgcggcgcggcggccagtgcggactgcggttcccgcccggcgcgcgggtgctgtgactgctcctccggggcggactggtgactctgcagcgctctggagcctctcgtgcggggactccgtggtgtcgcattccctcagagagggagacacgcacccggagctccgagcacagctctcaagggctggcggccacgacggcgtttgctcgggttcccggtgcagtccgagtctctgcggccgcccggtgcgcccgggagagcgcacctcccccggcacggcagaaccgaggcgacgaggatcaggagggtcctgcgcccgctaccactgcccaccgcgggccagcccggctgcgagcagcggagttgcagcgctttttagcgctctggagccccagaagacctctgcgaaccagtaagttgactgtagtttctgaagtttcgggcagcgtgggaaggacaggttcgttttattcctgtggttccaggccgaggttttacctcccgttagcggggctgcggctggaggaaggcgtactggactgcaaaggatggggcatggcattcgaagactcaaggctggagtctagggctggctcctgcctctcccgaatgtgccagctggaaatgtgctaggggagacaggtgctccgagggcatttggcccgccgctaaattgcacattctgagctccttgattttgcgccgcgtggggtcagggacgtcagccacctccatcctaggaagctctgcctacatcccctccatcccctcggaggactggcacagagatgagaagctgagacattgctgctcgggcctgcaggctttctgcacatcccacttcactcttcccttaggcagaagttgccaacctcccataattggagcctagccctttagggaaaaacaacttatgtgtcaaatgagtgttttgtgctccaaggcatagaaaatgagaaaagtgctctatgcgttttaattcatatgctttaagaatgtgggcaagtctcaaagaaacaggattccgaggatggctgagttgtcctgcatctcttatgtaagcctcctggctgggtacctttgcatctgcaggggctgcatctgggcctctactcactccattttttttttcaagtccagcttgagccgtatttaataaaaacgttgacatgatatagtggttcgtagtcagaaacagggcagtctttaaattagactgtcttctcctaatagggagcatgggaggaagaacttggtgtatttttttcaaggcagttcaaggaattagatacataaatcatgctttaaaataccatacattgtacagagagcatgcacagaaccctctttagaacacatccccttttgttttagtaaaagtggagatttgctcataccagacaattgttgagtctgaaagtgaagtgcactgatggccttaattatcttaataaacaaagagcatgatttataggtagctacagtggcctactttgaagggtagaaatctttaacctttcattctcagctgcccctagagattccttttaagcagagcaatggattaatgccattgatgtttaatacttgagttgattaaatttgtaaaaggaattctttgaaataccatacagccctgctgtgtgactgataggcagtgactgttataaagaaagataatatttagagtaccagctttgcattaaccaaacagctcatattgcagctgccctgtgatacacatgtatccatagatggaaagaaatatgcacacagaaaaatatatacatgcatatggatttgaaataaaaactcagggatgtgagtcaatgtgagatttatttaggtgacctttagaaagaggcatgtatgggttagagtgcttcagtggatataacaagatgaactaactagttataggcacctggtttaagcatagttattattttaaggattctaagaaaaaagaaagattattttaacgttgaaaagctagttatcacattgtagtttataggagcattgagtgctgacccctagaagaaattttgtccaagtgtgggctttcaagagaccaggctgttggcactattgctggctttgaatctgagcaataccggaattctgtgcccggcgtctccatctgtaaaataggtgggtgtaattgcagtaccttcctggttgggttgtgcgaggcttaagtggaatcctgatgagaaggtattgagctggtgtcaagtatcgtaggctgactttggggaaaaagtttcatgctgtgaaaggaaatttgtcttgggataagctgtagacattaaacagctgttgctggaggtcagtagaagcagtgcacatgtgtaataggagagaggatataaacaccctggccacatgttaatattggatttactgtctccagcagtgcctccctgaaggccttctatggagatggctttgtcttgatgttagagaggaagaaactgaggccgagagagatcaagtagtagaaattagagctggcatcttaaacatgcctgttggaatcttgttctttgaccctgctgcctcaacttgcaagcaatgtgggtgggttatcctttctccacgggaagtttatgtttaaagtttcaagtatgcaaagtgctaaatagcactccttcttcgagactggaagctattatcatcaacttctctgttattaaatgccaggccctggttgcaaaccccgtttagtgctattgtgagaaagataacagggtgttttgccttcagctgaaactggattctgttacttctttcttccctgtttatacattcgtagaaccaaagagaaaagttgggtaacttgatactttgtattggtggttgatgctcgctattctgcctccctgcagcctgtgtctttgctgtctgtggtccacatggacacaagcagcaataatcagccagcattgtctctgagcatagcccagtgtccaaggaagaactccactcaggcagagagatggggccttgtgcttatcttgaactcagtgttctgaagtggaaatcatttatccatcacatctatgggcacacttcctttagtcttaggtttaaagccataggaagcagttgttggcggattccatacgagctattttggtttaaaatctccatggactgttgagtttctcttctgagttctagggtgtggggtgattgagtggccatggtactttgggctttcttaggtattctggtctttatcttttagatactgaaatcaattgctatagaaagctcctaggcagctgactcaccccaggtgagtgaatgtttactgaaaccctcctagctgatatccttaccactaaaagtactctaagatggatgctcactgctacctggctgatgctctggatctctctcccctcctaaccccccccctctctgtgtgtgtgtgtgtgtgtgtgtatgtgtgtgtgtgtatgtatgtatgtgcgtgccatgtatctgtctctccaaagctgctcaacagtgagtttccagtagtgagcttctgagagcctttggaggcacaacgccacaactgcagtatgccaaaaagaactcctgccaccaaccgagttctctctactgatatttcatccttccttttcaaacaatacatacacactttgcctcagtagctagattccagctgttccctgttctggattttctgatcaaatgtctccctggaacatggctataactagagctaaccctgtgaaaataatttccatatggatgttttatttcctatttgtgttgttatagtggattttctgttgtcacttttaaatctacaagaaatccttccccccctcaaaacacacacatccgttttcttttgctctcagaagactgatgtacaactacagacatcctacccttcattcacccaatcttatatgatttctgaagctaagcaggcttgggcctgcttagtccatggatgggagacggctcaggcatatagtctgcacattaattgtaatatggatataagtgagtaaagaccatttactcttccttaatcgcattactcctgtggatttttcacttttatctgaggagctgggacttgattttgatcctacctcattcagtgtatgggctgacttggaagttacacacttaagttatacagacaaggtcaggatgctgcagagttcaggggcttggggtagatttgagagaagacagccttgagcatgatttatctgaccacttttctagtcgctactggtcatgctttctgataagagctcttatcgtaatattcagctgggagtgagcgctcactgtgtgttggctgtttatggcaacattatgtacagtgtttccctccaccctgacaccagccttttgggaagttcctatactgtagtgcttttgcaaacgtagaaacggacctagaaaggaaatgcatccaagattacatgagtaagttttgcaagaaaaagtagagctcagaacattttgatattccttacagaatatcctcctgcctctggtttttcagctattgtagtaagttctatagtagagatggacagtctcaggctctgcaaactttcccgtccacagcgtggattggctaaataagaagtaccagctctgtgtttttgtcaaggtagaagcttaagcttaatttatgttagaaatcaaaaaccacatatcactttgtgagaaagaaggagcgaaagccacgtgttactctgtaagtaagaagtttgagtgcttccggtagggtggcaaggcaaacttgcttccgttgtgctttgagtctgaggtttgcgtcattgtcctcgaacaaaggagaagtagaaaggcctaagatttttctcaaatgattttttaaagtttatttaaatctaaaaatgtcagagttacaacagcagtagtagttatttgtggtatgactgtgtgtgtgtgtgtgtgtgtgtgtgtgttttaaaggaaatgcacccacatatctaacaagtagggatcagaacaaacacattgactccatgcaagctcccatgtctgtggtgtagccttcctgactccagtccggataaaaagcagagactctaaagccatactgttagattctcaaacccttctgtgagataatacctctgcagggaaagggggaggggtaggggagggggaaagcagagagacagactcactgcctggagactaagccctctgcctgccgctgagctatatcttcagccccatttcccctctggattttacattggaaccaccatcatttcgggtgtaattgaaaagttagtcagtcatcgtaacattcaggcatagactggatagcgcctctgttcctatactagactgtaagactggataagtgttaaaccagcaagtgattaaaaacttattttaaaactctgctttctcctttctaaatatagactgccaggggacaggaaactcgacctgaccgtggcctttattaaaacacagagcatttgagtccctgtgcactttatggaatggactttaaagttgctggcaacctttcgtaagcctccagctggcccaacgaaatatatcatatccactctttatctgcaagcttcccctgtcttcctcaaaggaccaaaggtgtgagtgtgtcagctcttgtcacctgtcctcctgcatagccgccctgcgtgctcaggcttctctgaatgtagtcctcgtgcatctggtctcctgtatttctgactgtctgtcactgttggctgcttcgcccaccccagtcctttaccctgacgtgtacccgtgcctcgccgtcccatctgtgtggggtgggaaacgatcctgaagcagcacaagctgtaagtcagggcaggaaagctgcacagcgcagcgcagtgacttactgttaaagagagggccagttactaccacagcctctgtcctcagcacctgacaaccgtactgagtagccttattatttcatatgtgacatctaaaaagagctgtgtccctctaattcacacttaaccagccgccagcagcttggctgtgcatgcatcaagtttggtgaaagtgattgatttggatttttcagatatgtattttaggagataagctgttagggataagccgctccatacaattgtcaaagaaaagactcaataaaaataaatgaaaaatacaggaattaaaaaaaaaaagaaagaatgtggctttccttcaggggctggtacttggtctgggtccatgttcggggttggggcagatggaggtcattgctgagctgggtagtggactgtaagacagcagctccgtgagctgggtagtggactgcaagacactttgtgaagtgtcttggtggccagacttggtcctggggtgagtgagttctggggctggattcagggcctctcgaatctgaggcgcctgagctctatcccagggttctgctggctttttattttgagacctatttgcttgggctggccttgaattcagtctgcagcccgagtaatccccttgccttaaccgcagtagctggggggaccatccactactgccaggcctggcccaggctgtcggtttagaatgttcaacctggtgcatccacaaaacaagtgaactaggagacggaaaagggaagccattaaagtctgagttcagactggtaagggtatagacgctgagggcacggggcgggggtagaagcaaggaggtggcgcagggacgctgaagagcctccccagatgacctcgctcagatcactgaagagataaaagttccattggtgatgacagtgagcacagagggtggagcattccacaggggaaggtgacaagctgtggatttatgccgtgtgaggcaccagagggacatcagagcctagagattctatgcaactgccagcttacaattcaaggcaaccgctgagatgcagatggagacttagcatccatttgcagcttattaaggtgtccagtccactgagatatcttggatatagtatgactctcgcttgtgtttataaaacggcctcaccgtgctctagatagtggagtacatggaatggatgttgaggctgctggtcagcctgagaaaacatgtagaataaaaaataaagtcaaggccagggtggcacacagaaagataaaggagatgggatagaaagttaactgagagaaatttttgacaaaaaaaaaaaaaacgacagaagccagaggcagagcagggtgaggcgcttggctgagtgtgagctgaggacacagaagtgaaaccggaggtgccacagggcagggtactcctcctcactgtgtctgcaccggagatggggcgattgcctggtggctttcagttcccctccatcagtattaagagtctggatggtaggtaggatgccattcaggaatgaagtacgatcctgaactcagtctactaatggagtatggacatcgtgtcgtcttcttttcctttaattttccccatcatgatcagaggagtgcagacactggcagagtgggaaggatgggaaacacgccttcttaatgcataaagtgctcgatcctccgtgcgagcaggagtgcgtggatgggacgtggacagcagcacaatccaagttcacaaacaactctgctttcacgtggcgtgctgtcattagaaaggtggcactgtgtgccagtacttgcaacacttgtgacgtgtctagcccattgggctgtctgaggtgttctgtatatagcatgccatgactttcatttgttttatattgtagacaatgtggagtatttattaaccatggagatagtttctgtgcttccattcctgtccatactcacatgtgtgagcctatcaaccagtggttctcagccttcctaattctgtgatcctctaatacagtcttcatgttgtggtggctctaactataaagttattgcattgctacttcataactgcaattttgctactgctatgaatcatagtgtaaatttctttgttttcaaatggtactaggcgactcctgtggaagggtcctgcgacacacaccacccccaaaagagctgcgcctcactggttgagaactgctgctagagcaggaacattttgcatttaagccattgcactacattacagaaactggtaacttgaaatagagtccagaggagagacccagctgctaaatgattaaggttgtcagacccaaactcagatgttctggcttcacattgtgggttcagatgattctaaggtactttttatcatttgcaactaaaggtaaacttggaggaggatggaatccttcgatgtcttttaaagttagttcacttaaagcatcagcactagaaactgttgctgactaaaactcctctacttaatggaccacaggttatttatgcaaatatctaattaagctgggggaaagtaggggtttcttctataaaacaagcttttttctattattgatgctgacttttttagaaagctcctatccataaagcctcgaggcctaatattttaaactgaaattcttgtacttaaatttgttctttgtgggaatatatttcttaataattgcagtttctgctgtgtgtgagggccattcagcatgtgcattttgtgctacaagtatatcagacaaaacccagccaagttaggtttaaactattggtttcccttaataatgttcttgactgctttggtcatatgaaccaataggcatattttggcttgtggaagcagctattatgttaccaatataaggctgaagtcttacactgacattgtctttttacctaagtgctacaagatgatgcagtatagctctaaagatgcctgttccacaacttgtattttggctctgaatagtccaaattttccttaatattgtcatcaaatcatatatagatacatacatatgtgcagtaatgcttgagttagttgtgaaatggatatgtactctcataaccattgaaaaagtttacaatgttgcttttttatcacacacacacacacacacacacagtgtatcccaattgctagctggcaatttgcagatggaagcacttcctagcaagtaacaaaggccagtgctgtccccagatgtcagagtcacttctcatgggccagttttacactctagcttcagtaggaaaatctaaaggggctgacatttctgtgtcttcagtggatggctctttttcttttttttaattcattggatggcaattattttttttaataatgagacatttgtaaattctgaaatgttaataaaaatgcaaggcaactatcttagtctggtaattactgtcccacacagtagtgtaccagccttaatccattgcagtgagaaattacaatataggcacatgaaaatctaagtaacaatgtagagcatcatggtactttaaatatgattttattgtactttataatatgtcaaatgaagattaatttgttcttttcatgcctgatgggttccaatttcatcccaatgcaaatattgtaaaagagaaagcggttaggcttcggttcttcaggtgacttgccaccgccgtatactcatccacacacatgaacagtcaagctggcttgcctactgatattccattatagcatgtactatgagttttcacttcctaaaaaagagtagctatatttcttctaagtcctgttggatttcagtcatacatttttatgttctttatactcgacgtgctagaacatgtctaaattagcgatctaatttgaatactataattatatgcacagttgagtttgagtacagtgtttttgcataatgtgatggtctctcttagtgaatttaggaattccatggttccaatttcagagtcctaaatctatatacgcttatggaggggttcacaggacagaatgcaaatactttaagcctatttgagttttagaaattaacatataaactatctacaatagctttttttatgtataagaaagtaacaagaaatacagaattaattaagaactaggttggtgtcacatctagtgactaaattttgccatcagggttaaaactcatactttgttttgctaaaatgataaataaaggtatatttaagcaaagtgatagcatgaattctcataaataattgtacatatttaatagggctaacatctttctctgactttactgtactggtcatgttggccaaaatgcacatcttgagcacaaatattagctttgtgtaatgttcaatgactaaagttgagtggcacactctgtaatcccagtgctctggaagcagaggctggagaagcaatgcaagttcaaacctagcctggtctacgcagttccaggacagccttgagatcttgtcttaaaaacaaacaaacatgaaacaacacacacacaagacaagagagagagagagagagagagagagagagagagagagagagagggagggagagagagggagagagagaacgaacgaacgagggcaggaaggagagagagcataaaaatttaatgcctctaaagtggcattggaaccgaatgcttttagagtcttgttaaaacagttcagcatcatccaggctgagatgttaggagtggagctgccagacacggcagccggtgagaccacagcagtacacagtgttatcacccttactcttaaagctaaccgtccctccctccacacttcataaccttgccaaccagatgagttatttgctaatagtagcatgtcaaaaccggaattattatggatcttttcctttaataaatattcaacagcattttcaaagcagttagatacaattcctaataaccagcgccatgctggctgcggtgtgcacactcctcagaccgctcatggccacagggcattgggcctttagacccttttctatgtattttcaagagctccacaatccctgggctggaataatccttttacttctccacagttacatatagaataaagagaatttctcatcttttcttcacctacgacgccaaggtctgtattcagagaatccctgttcgttgtgttctctgtctacagtgatatccgtccgtcttttacaagtaagagccttcacgttccctactgttcaggaagacgcagcactgactgtcttcctacttcagggctgttcatctgaaatgttaagagaggatggtgctgttgacgtagcaaaacgttgctctataagttgatagagtctttcacgttctgttggaggtgtactctgtgtgccgcagtctgtgctgactgagcagtgctctggcgtttaggagcgcacagaatgggacaactcctgccacaccggagctgctcagtcccaagaggagccctgagcctgtcatagggagtctccgggctctcaactgtccctgtccctgtccctgtccctgtccctgtccctgtccctgtccctgtccctgtccctgcccttgcccctgtccctgtccctgcccctgcccctgtccctgtccctgtccctgtccctgtccctgtccctgcagccatgaccgggcacttctgaatctcacttgtctttctctgtgcttcaccttaaaaaaaaaaaaatcatccaaacatttcatttggaattctaatttttaccagtaaaaatgtaatttgtcatcttttcttcaaagtcagtatcactttttcattgctcatatttacatactgtaagcagatttggatatgtttattaaagtgaaggcatacagccaggaagatatgcctgtgtgcagtgcagccgtgttttagagtagaccatgagcctgcttttcagcttgtctctgatatcagcccttctcctgaactcttcgcccggtgaatcgatccaataaaatcatgtagaaatcacggagctgaggtcaggcaagtgcctgtatcatttgggggaacatcaaaagaatcaacactgggaaccctgcctgtctggaggcggtgcaaaggcaacctctcccaatgccagtgtagctcagctgttacatgggccatgacagtgctcatcttaccacccaggggtggaggcccgggacagctgtgaccttgaggccagcctggtctacatagcaagtttcagaccagccaaggctacacagtgagacaaacaaaagccagcttttacaaaggtaatgcaatgctccccctaaagaaaagcagtcgactcagggattgctagtttctagaagttgtagtcacttctgcaccaaagtgaatcaatatttatatttagctgcataaaggaaaaccctaaagcagttcaagtgaagttttggagcaaattcaggtagaaaataaggtatccagttttcagaaatgtttacatttcagccttatgaagttttgtgagaacccaagggtactcactttcatttaccatctccttgtcccctcatcccctctgccatatccacattttagatggccaagccacaatgttagctttctatcagacttgatacagggccaagtcagctctttggggtagtgaatgaaggccgggtttggatacaatatggccagccaggctgcggtttgtggttccaactctttgtgacaagcctggattgtagccatgctcagactatacccagtgtggcacccagtttggttctgctgccttcagatcaagatgtagaactctgagctccttctccagcaccctgtctgcctgcacgctgctgtgcttccagccttgatgataataagctaaacctctgaagctgtaagcccaccatatgataatggactaaacctctgtttgtttctttttttttaattagatactttctttgttacatttcaaatgttatcccctttcctagtttcccctctgaaaacccccatcccctcctccctccccctgctcaccaacccatccactcctgcttcctggctctgacattcccctatactggggcaaagaaccttcacaggaccaagggcctctcctcccactgatgactgactaggccatgttctgctacatgtgcagctaaagtcatgagtcccaccatgtgttttctttggttagtggtttagtcccagggagctctggggggtactggttagttcatattgttcctcagcaaacatcttcagctctttgggtactttctctagctccttcattggggaccctgtgctccgtccaatggatggctatgagcatccacttctgtatttgtcaggcacctacagagcctctcaagagacagctatatcaggctcctgtcagcaagctcttgttggaatccacaataggttctgggtttggtgactgtatatgggatggatccataggtagggcagtctctggatggttactccttcagtctctgtttcacactttgtctctgtaactccttccatgggtattttgtttccccttctaagaagtatcgaagtatccacactttagtcttccttcttcagtttcatgttttttgggaattgtgtcttgggtattctgagcttctgggctaatatccacttatcggtgagtgaatatcatatatgttcttttgttattgggttacctcactcaggatgatatccaacagatacatccatttgtcttctaagaatttcataaattcattgttttcaatagctgagtagtactccattgtgtaaatgtacgacattttctgtatcaattcctctgttgagggacatctgggttctttccagcttctggctattataaataaggcttctataaacatagtggagcatgtgtccttattacatgttggagcatcttctgggtatatgcccaggagtggtagtgctggatccttcagtagtactatgtccaattttctaaggaactgccaaactgatttccagagtagttgtaccagcttgtaatcccaccagcagtggaggagtgttcttctttctccacatcctctccagtacctgctgtcatctgactttttgatcttagccattctgactggtgtgaggtggaatctcagggttgttttgatttgcatttccctgattactaaggatgttgaacatttttttaggtgcttctcagccattcttcagttgagacttctttgtttagctctgcaccccatttttaatagggttatttggttttctggagtctaacttcttgagttctttttctatattggatattagccctctatcggatttaggattggtaaatatcttttcccaatctgttaatgacctttttgtcttattgacagtgtcctttgccttacagaagctttgcaattttacgaagtcccatttgttaattcttgatcttacagcacaagccattggtgttgtttaggaatttttttcccctgtgcccatatcttcaaggctcttccccactttctcctctataagtttcagtgtctctggttttatgtggagttccttgatccacttagacttgagctttgtacaaggagataagaatggatcaattcacattcttctacatgacaacctccagttgagccagcaccctttgttgaaaatgctgtcttttttccactggatggttttagctcctttgtcaaaggtcaaatgcccataggtgtgtgggttcatttctgggtcttcaattctattctatttatctaccttggactaacatcttaaactgtaagccagccccagttaaatgttttcctttataagagttgccgtggccagggtgtctcttcacagcaatgaaaccctaattaagaccctcacctacttcagaattggggcctggagagactgagatgatgatgatgatgatgacgacgatgacgatgatgatgttaaaaggatatcccgggatatggctggggagagcgcccagttgtgtttgttacataagcataaggacctaggttctgagttcaagcactcatgtgaaaagccaggttagggactcacctgacaggcaacaagagagatccttcttaataactaaagtgggagcagaaaagggagatgccttatgtagactacaggctgcacatgtacacatgtgctcaagtgataatacacacatgggcatgtgagcatgcccacacgacacacataatgactacatgaatacttaacaattcatgaagaaactccatgggcaacattcccagttttcagtccaggtagcctggcacaaggttgtggaatgagaaaataggcagtatagaaaggcgtgaaaactggggaagagagtccactaggaaaagctttcttgtggtagatgaaagtactgagagctcaagaggcatcatgggagctgtaatgggagctgtgcgggatctccattgcactcacctctcaggaggacactggctcagagcaaaacacctaggcatgttctgaattgtcaagttcttcattgccgtgtaaaatagtgtgcctaatgatagcaaataatgatgattagtcatttactcgtgaacttcccatctgtgttcagttccagatccgggtggtttcctagggtaggccagagctcatttgttttgtttttgtttgttttgggttttgttttggaactcctattccctcccccacccccacaccctgcccccaggaataaggtttgctttttttttttttaaaacaagtaaatgtatattctatcacagtaaatatccttgataaaaacatatttgagattgtgagacccatttatgaaagagccatgtgtactatcacatcaacaatagagaaaaagatatgcattcacaggagcgtctgagatggctggcctgaatattcctgaattgtacatatttctttgctttcccacattttccattgttaaaaagctgacagtctgttacacactatctcctcatttaaatgtgctctccccgcactgtctgtgttcgccatggtcctttgtgtggtggttttccaggatagctacacattagcatccctggggaggcctacaacttgctgactagtccctacttagtcattctgattaaagggtcctgctttggggccttgaccttaatgggtttttaggacacagctgatgttaataagtagcgatactcaaacatacctgaatcgaccatgtcaagagccattgtgaaaatcagaggaaggcctctgtggttgagtgcttgcctacctcgcagaggtcctgtgtgtgctttctagaacccaaacctggcagtacacagtagattcagctctagctcaggagggttcatcctgtcttctggcttctgtggacaccggcactcatgttcacatacccacacggttacatagcttaaaaataagacccagaaatagcaactcagagtccaagcctagtacaaaacatcgtatgccaaccgggtgctgaaatgctgctcttgaatacctcttctgtggccacagcctggtgagactgtagcaggctaaattcactggttaaaatgtgtgttagaagcgatgacttccaggactgggcgtgtggctcagttggtagagtgcttgtctacctctcatgagctcctgagtccagtcaccaacatcatataaactacatagggtggcacttgcctataatcacagcactcaagagctagaggaaggaggaggcatatttcaaggtcaaatacatgatgagttgaagctagcctgtgatattgagctcctatctcaaaaggaaaggaaagggagggagggaggaagggaggaaacaatgtcctggtttggtgtttatctaataacagattgggacctagacttcattaagtctccaggtagctcatctcagcagagatacaagggccagtcttcaagagaaaaaaattatatctgaggactgttttctttctttaatacctcatttgattctcacatgaacctcatgagattcaaaagaagcttattttttgaagttacagattaggaagtaggctcagtacaattaaacatctagcccaaggtcatgcagccaatgcatggtaggtctggcaacttaggccatttcacaaatagaccctcatgtgtgtaaatggaaagagcatagccatacaacccaggaaacctctacaagcaagcagatgactgagatgacagatgcagatacccacagccaaccactggactgagcttgggggatccttatggaagagttagaagacagacagaaggaactgaaggagagggcaactccataggaagagcaacagtgccaactgatcagacccctcagagctcccaggaactaaaccaccaaccaaagagcatccgtgggccagtccatggctcctgctacatatgagccaaggactgcctgtctagcctcagtgggaggggatgcgtttggtcctgtggaggcttgatgttccagagaaggggatgctagaaaggttaggtgggagtgggtgggtaggtgggtgagcaccttctaagaggtaaagggggagagggactcgtggaggggagaactggaaggggaacaacatttgaaatataaattttaattttaaattttttaaatttaatttttaaaaagtaattaaagaaagaaaatataaccccccaaaaaatgtgattgtagattaggtgtagtgatacatgcctctaacttaagcacttgggaggctaagacaagggattacaagttcaaggggagcctgtaatacataacaaaataaaaacttaaatgtagatatgataaaccataaatttatgtttgtggctcatacttgtaaactatggtatatgttttattccataaagtacatttaagggttaagaaaagagcttagttttgtttctcaaagctagagtcgtagatctgaaggaaaatatctacattgcaaagaagacgtttgatcttgttggcctttatctctaccctttcccttgaaagaactgaagagggctaaggggtggcaagtctttatccccatggacttgagaactgaccattgtgcgttgtcaagaaccgccctgcttcccgccaccatgaatcatttacgtcttaagtggttcttgaactgttgctgtgtagatgatgtaagcgtgggaagggagttgctgactggaagcacattgatgatcataaatcacgcttaaaagcgctcctgccaacacatctgcttctgcaagttacctgtctgcgtccatccgaatgtgggaggcaggttccacttcattttctgtagataggatatcgaccatgtttgtatgagagatttcatttcctcatgaagtggggttcagcagcctgggaagtgcgtggacagaacatgagaggacaagagaagggtcttctaagccagcctttctctactgtgtgctcattgtcaggccatttacgggtgaccagggacagactggcctggacccaggctggtgctgcctgtctctggctggaaaccagcatcagtgatgtatagaatcgatagagaagagatactggccgttttattcacaattcactccaggtttgccatactggagagagagacagggtttccttcaaaacttgaggtaagcactctttcctggggttattttcattgacagcaatcaatccattttcttctgtgacactgattgtccagagaggctgatgtcttctgtccaggttttcccaaagggatatgggcagcctgggttgtgtgatcagtctcactgccaaactgctcatggtggcgctgggccatgtctgggaaacttgcataaagacaaggcacatcagacgtggatgcaaaatggtccccatctgtgcccacagttgtaagcaaaggaaagaggaatatcagtgacacccttaaaagggaaaaactgtgagcagttaattgcggcttgaagagcagacagggggaactagctttgggtataggaacagcattccatgagttgattgtgtgcattgtccataaagtctggacacattttctagatatatgcattataaaataatattggcataccatttattatggagattcatctatttctatactttattaccacatgaggtctttaattaaaacaaaacttaattgagctaggtagcattctcagtggctgtctgtgtctgtggtagctggcttactctccaaagagaagatgttttatctgcggtagatttgggtcagaggggtagatttgggtcagagatggggtcaggtcttgtttttaatgactttttttaaacatttgttatattttatttaggtgtgtgtgcatgagtgattgagtgggtatgcgcgtgcatgtgtgtatatgtgtgtgtgtgtgtgtgtgtgtgagagagagagagggggggggatgtgcannnnnnnnnnnnnnnnnnnntgtgaatgccagaaggttttgaatccctcgagtgacaagcagttttgaactgcccagtgtatgtattgggaatagaattccagtcttctgaaaaaacagtaagtgcttttaacttcttttgtttcttcttttttttttattggatattttctttatttacatttcaaatattatcccctttcccagtttcccccactctggaaaccccttatcccatccccccccaccgcctacttctatgagggtgttccccccacccacccactcttacctccctaccttcatattctcctacattggggaccaagggcctctcctcccattgattgctgacaaggccaccctctgctacatatatgactaaggccacgggtcactccatgtgtacttcttggttggtggtttagtccctgggagctctgggtgtgtggttggttgatgttgttgttcttcctatgggttgcaaaccccttcagctcctccagtcctttctctagctcctccattgggttccctgtgcagttctggttttattcagccagtttgatggcaccacaaggcactatacagtcagcatgctgttttcagaacagtcatcccttgatattcatgggagatgtttttcaggatgttctacagatgtcaaaatcagaggatattcagacccatgtataaaatggcatagtatttgcacataacctatacatatacttctatttactttaaatcgtctctaaattacatgtagtttgaaaaatggaaatgccacttggcctccataggctcaccatatttaaatacttgggctccaattggtgggactatttgcgaaagatcaggaagtaagaccttgttggaggaagggcacgctttgcgggatttcagaagcccatgataccccttattagctctctctgcctcagtgaatggagatgtaagcgcttggctactgctccagtgccatgcctgcctgcctgctgccaggttgcctgctataatcggcatggcctctactgatctgaaagggaaggtcccaaacgggctcttttccataagttgctttggtcacagaatagaaaagtaactaagacaccaggcaaacagttggtacattgtaattgtttgaggataacaaaaagaaaaaaaggttgtatatgctcacaactgatacttttttgcttatgaatatatttggcaggaggctagttgtatccatagatggagaccctcagggatttgggaggcatagtatatatatttaatcccttaccttctaaatatttgctaaaactcagttgttggtttttttttaaatattttttaattttatgtatatgtgtgctttttctgcatgtgtgtctgtatgccatgtgcaaacaatgcccaagaaatctgaaagaaggggtcgccccctggagctagaattaccgatggtttaagccacatgtggatgctgggcacagagcagcaagtgcccttaaccactgagccatttctcctgctgaaggcaattgctctgacacatgctaggacatactgttaaggcctcactgttcccgcctcgtcagagggtgaagtgagtggaatggtggtgtggaatgtcaaatgcatgtatacgtggtatggtatgatctgtctaatgaacacatgtgcagtgtggcctgtctaatgcatgcatgcacagggcctgtctaaaacatgcatatgtggtatggcctgtctaatgcatgcatgtgcagtgtggcctgtctaatgcatgtatcctggaagtgttttggttgcactcagagagctggcagaagtcacaatctggcctccattccctgtatttttctgtgattttttttttctctttaagttcaccagtacaagaaataagtgccagattttatatcagataaagagattaaagaatgagttaataagatccctatgccatctgaccagtaaagtggcatattccagtgactttcctgagggaacaattttcagtgttttttcttctgtatacagtagggggaaatcttaatctacaaagttacaatattgtttagtttgtcatatcagctccatgatgagagcttagattttggtatagctgtacagaagggcgtagtcgtctgatggagagttgtgggtatctatgagtgaacgccttctctctgagatccagggagtctagcaaactgtcgaacttcatatacctaaaatgaaatcacatttaaagtgaataacttttaaataccattattaaaagtcatattgtcactataatatacataaatttcttttttaaattcaggcagatgtctaaaccactattgtgaaggtacttgctttaattatgtagcctgggatatacctgtcagaaatatgattgtaaagtatgccattgattgatgggcaaatgtttcatggattttggcatatagcaaggcctgccatgagttatccgtccacgtatttgaattctcaggtttctatgaaggaaatgaaccagtgttcctgcctctttgtcagttctcccttggacctatgaattatgatcttctcatctacagtgtacagatacccagcctacccttctgttccacatgtgtcctgttacatcttctctccctgcggtcttgccttactgtctcccatcactagctgcacagataagacagatcagtctgccgtagcttcatcctttaaggtctgttatactgtctgctaagcactggtcccatattatgtttgtagtctctagctagtctgcattctgccagatctggccagcccttacgttcttacctgatgctgagagaattttctagtatattgatttgttcatatcattctttaaaatattacattgtttcttctgaacatgggtccagacacttttgtgtccttagcatggcatacagagtctctagagatgagactcctgatggtggattagcctgctttcctacactttcctaggttctagctgagcacgcagtgtgctcagatgtgtcctgcagccttgcgtgagctatccctgagtccagctactaagtcctgctttacttttcagtgcctcccttctctgagaagctgatgctgattgtccgatgccccacacaatatgctttaaaggctttccacttccattcccataatgttatcagcttcaagagcgtttcatgctgtattgtcttaatacctacttcccagtggccagcattaaatctactctgtagtaaccagatatttgtgaccttgagcaaattcagtgtactgtctgtctagttgtcttcatccagatagcaaatcttttctcatagagtttcaggagataaaagaacatacagcatcaacccaatggtcggcacacaagtagagctccatcatcactgtcttctaatgttatagtccgcccaaagagtgtgcacaggacactcgctcaatgtatatagatctctattgagttaaaaaaaaaaaaaaaagagctgggcggtggtggcgcacgcctttaatcccagcacttgggaggcagaagcaggtggatttctgagttcgaggccagcctggtctacagagtgagttccaggacagccagggctatacagagaaaccctgtctcgaaaaacaaaaaacaaaacaacaaaacaacaacaacaacaaaaaggatttgacaaattatcgaagaggaagtttagaaagattttaggatatgtggtccttgtagttgtaatactgtaccccaggagaactaggaaatcctctaaacattgcaagtgtatttaatattaacaaggtaaactacaaaaattagaccttttatttgtgaaaaatattaggattgttaagatatatgccaggtaaggggaaagatattcattgttcgtggatcaagagatgcaatccctcttcaaattaatcagtaactacaacacacctagtcttcaaagcttttttttattattttcagaaaaactgaaaatgttgagagtattctccctactttcttcacatttactatgtcatgtggacagagacactcacaatctttttgtactgagctatcttttcaagaaaatttgtgatatgaatatctatgaaggaaagagatagcacttccctgcaaacaaagagtaggcttgttttattgcctgacaagatattgtctccttgcagcggaaggctgcattaaggacaacacaagatccctgtacactgttggcgtgatgcaaacctacagcagtcatggcgtccaccaggcctttctctggcgccactggaatgtgagcatcaggcagaagagacagaggataaaacctgtgctgattgtctttctctggcacccataaagatgagcaggtcactatgttaacttggagttgcagaggcctcaggggttaggagtactggctggatttccagagccctcgtgacaaccaagaactatctaactccagttccagggatctagggtcctctttggcctcgaagggcaccaggcaggcatacaatggacagacgtatatgcaggcaaaacaagcacactcatagcatacaaaaagtaaaaaattaaaagtgtgttagcttgagaatttgatgaaatctgagatctctttcaattcttcacagaattcaggaatccctacttgtaaaagtcatttaacatactgaattataagggtgaacaattaaaatgagtgcaatgcttactcaaaaaacagagcaaatcggccagctattactgtcccccaaaggaaaattgtttgctgattctacttttctctctcctttaagatgacaaatgtacctcttcaatatatctgatgcctttcaccctgacaatttctgtgaccttacctttgttagaatttagcatttctgggcttttctattgacatgttaagctgtattttcccccagtatttttatgtacagtgtggttgtttaaatatttgcattaaataagcaagacagtttcattcaggctctttcctttgagaaagctctttccagttcttttctgtgtcaccatgtcctgctccctcttattacacctaaatatatcatagtcatttctctgtttactcattgcaaggataaccacattgtagggtcaaatgcattagagggagagatagagggccattaataatgattatggagtgttgtcttagtgccaggagctactgtttgggaggtaatggacactggggaaattaaagatcataaaaattgtattaatgtccagttgtaactttaacaaactgctatcacagcacagtgttccaattttcacaaacttctaaatcacttggtgactttgagtccttttgggaaggaattgctatataaataacacacagacaacggggcattttccaaaccaaagctctttgggatactagatattgagtgatttttgataaaaacgagttatggctgcacaatgtaaaaataagagtaagactttatttgcagggatcttgagcttggaatcactaatgattccaatcactatgtacacataattgaagggtactagtgacaactacaatgtctttccatttttataactgtgacaccccccctaaaatcatggtgaacagtagaaagaattgttctatggattttcatagccactttaggtctttataaccatgttttagtatctagtacatgaatgactgcagtgtcctctccagctgagggcttgcttatctgcctcagtgactggaccctgggtactaatgggcatcattgcccatgcgtatatccccagtgctcgctgggctgtctctgggaccttatgcaagtagagccatgctctgtgtatcttgtgacttgcttcttttattcagttattttgcatctaactgtagtttatttttgttgctttgtaaactagtgttttatgactattcaaagatcatctatccagtcaccattgatgttaccttaggttttattgtcttctttgcttgtgaatagaggactaagtatacacataccacacacacatgcacacacactcacacatgcacatacatacacaccctctttaaaatggggaccagcaaactcttttttataaatgaacacttagtacataatataggctttgcagagtacattggtctctgctatctatcctttaaagaaaattgtaaaaaccactcttggcttgtaggccatagtttcttggaactgttctcagataacacccaagaggagaaatgtctatcatcaattatagacacagccattctgacatgaaatgggaattgttttcagtgagattaagcctacttatcctccctcccacaagcagtgggagagagatcccagcatgcatcatccgtatcacaactgagtgttatcatagtcttcatttgctggtgtgtgacagtccttcccactcaagacggagcactgctgtggtgtgtgacggtccttcccactcaggactgaggatagtaaacttgaccttgtggtaaaagaaacttttcaccttgcttattcaaagttttgtggatttttctttcatttttaactgtatattgttcatcttaagctggtgtttgcatatgatatgaggtatgattgagaaactacacttcattaaccagttgtctgagtatttttaatgacactcaggcagtgcatatggattccaggataagctgaaattaaatagtaagtgaacatgtagctgaaatgaacatttaaacacaaggacacatttttccttttcctacaatgagagcaagaactagcattgggcctcaactcctttaccatagtcctatctcagaaaagcaaagcaagtgactttccctttatattactcctatctctatgttctgatttaaagtatgctttcataatttattctgttattagctactgtatgtcagccatgttaaaaatatgatatgcctgctaaagcaattagcgttgtatatgaaaaagatcacagggccctaccaccaaaaatctaacaaacaaaacccctcctgctgtaatgtaaactgtaacattgaacaacttcccatgctgactgtgaagcacagtctgttgattgcattgacaactcggctttgtatctagaagactcagtgtgaccaaacaagccttaagtttatttagcattattcttagttctaaggcacttggatataggagctgtgggcagacctcagctctggcacactgtcccttgtggccttttcacagaaaggacacatattctcgtgtgtcgagactgggcaggaatggctagtgtttccttgagaggtatcctggggcaggtgtggtgttttgaactctcatgttgactacactcgtagagcacagtgcaagttttcaacacagctagttaatctgcactacatgttgctcactgtaacgtgctctttgttggatactttcggattggctgtatgtcaagctggtgaggaagcttaattctcctgcatcttcagaacggcttgataatgcttgctttatagttcactgagtacggtaccgtgctgtttccttctgttcacccagcaatgagaaaatagctgcatcaagcagtattgtaatgaattttcctagcccaaggagctgccgtttgcttctaattgctatgtggagcatgaaatcagagccccaagttcctcagaacttctgcaaaagaaggccccatagtcacccagctacctcagagaacgtacagcgtctcttaaagagccttctcaatggcacttacgctcactgccatgccatatcttatttggctctattgcctttaactgaatttctcaagagtaatccatttgtgttcattggcggaaactcacatcaatgtatgttacagggacgtccactcattattagctaatgcttttgccacactgtacattttacttcgagagttgactaacgtgagctaggatgtacattaagaccttagtggcactttagtaatgtcactttgtatgtgcatcctacaagcaggtcactggggagaaaccctcagagactacgacgagatgtaagtcctaggtggctgcttctcattaaacagaaaagaaagattccctcagataattacccaagtaggaaaggaactcgaacataggagttcttggtagtaattacgaattatcacccacacataaaagatctccttctgctttctaaacgaaagtgaacatcactaagtattttctttgaaaaaaaaatatttaaagcatattacttaaaaaccctttaagtctttaataaccatcccaaattgatttcatgtaaccttctgctactacttgataaaaattttcagtgtagcaaatgcaatttccttgcttaatcacaattctaaatttagcctcaatacaaagggaagtattttctctctgcctccagaaagatggcatagacatactttcctctgttctgctaagtccaactaaaactcaatgtatagtatatgaatcaaacataggattctaaagatgacgaggaatcaagaccctgtggaccctgcgcacaatccaatgatacatgtcctgggtttccttccacttcacataccccagatctggaggagaaaacattattgagaaaacaccaacataaactaattaacaagcaatcacacagcagcaccagtaaaatagaaagtgttttctgtagttaaattgccagaatgtgatggccttgacaagaaacccttaatcaacagtccccactctaaggcactgttctagagaaatgcacggctccattccgacagcagtcactggtgggaagcagcaatcggccacgcctgctaggctgcagttccccagccttcctcactggtggtgtcacagacaaaagcattcctttcaggtgggtgctaataaaaacctgcattccatctccatacaagtaaagaacatagagaggcctggatgacccacttccaatagtgtggccctttttcttctcctactgaagtcagaatacatcacacaagaaacaatgggtgactcctccgagccaggaaagcatccatgaaggccgaatagagactcagagtctcactcctgccaggccttcagaggaagtcctcccctcagacatcagtggagttgtgctagggagtcctaatgacaccttccttctcccacccctacccagcttccttagctggagttgatatcgaaagaatgcaagggatccagcaatttctaccatatttccatatgtccacattttgatgaagaacaaaccaaaaaacaaaaccaaacagcaaagtcaaaccatgttacagaaggaacaaggcagcctctggggagagaaggctcagtcagtggaggccagcactagatgacagatgtgagagctgcccgctaaagacgttagagcaccaccatgaaccaggagctacaaatgtgaacattgacccctagcaagcaagtgggaaatacagtgaagatctcgtgccctcctggaatggaaaagtctaggaaccggaaggaaggcctcagtggagacactgtagaaccagatggagggcacacagcacaggtcagtgagctgggagttagaaccatagaaattattcagtcggaacaatggagagaaagtagactgaagaataaaataaaagaaccccaggaatggtaagagtgtgccaaaaatctaacattgtatctttggaacaccctaagaataggaaaaggcagggaactgaaacacatctgagtaagaaacgaaaacctacaaaatttgaccagaaatttgacagacataagaaatgccatctagttgcctggataactctccctgtaagccttgatcctaaaactgtgaatgcattgttgtatatgataaaaggacttcccaggggtgatgggatttttgagataagaaaacaccttgtgtcataagagttctcctaagaaacagacagaaagggcactgggacgagtgctcagcagtcaggcctgcaaggagcactggaagctgtgaggtcaggaggtggatctgctttggacttccaggtcagtgcagaacttcttacctctgcatctgaaagacaatcaattcaagatagtttaagctctgaaacttatgaaaattccttacagccacagtataaaactaatctactgatttaacctcagacaaaaggaagccatgccatggtgcaccatgcccctgaacagagtgccaaggagacaagcctgggaagcatgcggcgtggctgcagtctgaatgccagtggacagaaactacaaagaccaaaaggacttgacacttcagtattctaagtgatgtaagagctgtctccccagaatcctgtttcccatgaaaataccctttaggaggaaaaggaaatcaaggtactctctggtgaaagaaagcaatcaccagtagatctctctaagggatttgctaaaggacatgccctaaaaagagataataatcttgtaagatcaagaaacttaaaaaaaatgcagtgaatataagtatggctgaagaatataggatttccaaaggttttgttgttgctgttgtttgtttgctgtctttttcaaacagggtttccccatgtagccctggctgtcctagaactcatgtagaccaggctgaaactcacagagatccctctgcctctgcctctgcctctgcctctgcctctgcctctgcctctgcctctgcctctctgcctctgcctctgcctctgcctctgcctctctgcctctgcctctgcctctgcctctgcctctgcctctgcctctgcctctgcctctgcctctgcctctgcctctgcctctgcctctgcctctgcctctgcctctgcctctgcctctgcctctgcctctgcctctgcctctgcctctgcctctgcctctgcctctgcctctgcctctgcctctgcctctgcctctgcctctgcctctgcctctgcctctgcctctgcctctgcctctgcctctgcctctgcctctgcctctgcctctgcctctgcctctgcctctgcctctgcctctgcctctgcctctgcctctgcctctgcctctgcctctgcctctgcctctgcctctgcctctgcctctgcctctgcctctgcctctgcctctgcctctgcctctgcctctgcctctgcctctgcctctgcctctgcctctgcctctgcctctgcctctgcctctgcctctgcctctgcctctgcctctgcctctgcctctgcctctgcctctgcctctgnnnnnnnnnnnnnnnnnnnnnnnnnnnnnnnnnnnnnnnnnnnnnnnnnnnnnnnnnnnnnnnnnnnnnnnnnnnnnnnnnnnnnnnnnnnnnnnnnnnnnnnnnnnnnnnnnnnnnnnnnnnnnnnnnnnnnnnnnnnnnnnnnnnnnnnnnnnnnnnnnnnnnnnnnnnnnnnnnnnnnnnnnnnnnnnnnnnnnnnnnnnnnnnnnnnnnnnnnnnnnnnnnnnnnnnnnnnnnnnnnnnnnnnnnnnnnnnnnnnnnnnnnnnnnnnnnnnnnnnnnnnnnnnnnnnnnnnnnnnnnnnnnnnnnnnnnnnnnnnnnnnnnnnnnnnnnnnnnnnnnnnnnnnnnnnnnnnnnnnnnnnnnnnnnnnnnnnnnnnnnnnnnnnnnnnnnnnnnnnnnnnnnnnnnnnnnnnnnnnnnnnnnnnnnnnnnnnnnnnnnnnnnnnnnnnnnnnnnnnnnnnnnnnnnnnnnnnnnnnnnnnnnnnnnnnnnnnnnnnnnnnnnnnnnnnnnnnnnnnnnnnnnnnnnnnnnnnnnnnnnnnnnnnnnnnnnnnnnnnnnnnnnnnnnnnnnnnnnnnnnnnnnnnnnnnnnnnnnnnnnnnnnnnnnnnnnnnnnnnnnnnnnnnnnnnnnnnnnnnnnnnnnnnnnnnnnnnnnnnnnnnnnnnnnnnnnnnnnnnnnnnnnnnnnnnnnnnnnnnnnnnnnnnnnnnnnnnnnnnnnnnnnnnnnnnnnnnnnnnnnnnnnnnnnnnnnnnnnnnnnnnnnnnnnnnnnnnnnnnnnnnnnnnnnnnnnnnnnnnnnnnnnnnnnnnnnnnnnnnnnnnnnnnnnnnnnnnnnnnnnnnnnnnnnnnnnnnnnnnnnnnnnnnnnnnnnnnnnnnnnnnnnnnnnnnnnnnnnnnnnnnnnnnnnnnnnnnnnnnnnnnnnnnnnnnnnnnnnnnnnnnnnnnnnnnnnnnnnnnnnnnnnnnnnnnnnnnnnnnnnnnnnnnnnnnnnnnnnnnnnnnnnnnnnnnnnnnnnnnnnnnnnnnnnnnnnnnnnnnnnnnnnnnnnnnnnnnnnnnnnnnnnnnnnnnnnnnnnnnnnnnnnnnnnnnnnnnnnnnnnnnnnnnnnnnnnnnnnnnnnnnnnnnnnnnnnnnnnnnnnnnnnnnnnnnnnnnnnnnnnnnnnnnnnnnnnnnnnnnnnnnnnnnnnnnnnnnnnnnnnnnnnnnnnnnnnnnnnnnnnnnnnnnnnnnnnnnnnnnnnnnnnnnnnnnnnnnnnnnnnnnnnnnnnnnnnnnnnnnnnnnnnnnnnnnnnnnnnnnnnnnnnnnnnnnnnnnnnnnnnnnnnnnnnnnnnnnnnnnnnnnnnnnnnnnnnnnnnnnnnnnnnnnnnnnnnnnnnnnnnnnnnnnnnnnnnnnnnnnnnnnnnnnnnnnnnnnnnnnnnnnnnnnnnnnnnnnnnnnnnnnnnnnnnnnnnnnnnnnnnnnnnnnnnnnnnnnnnnnnnnnnnnnnnnnnnnnnnnnnnnnnnnnnnnnnnnnnnnnnnnnnnnnnnnnnnnnnnnnnnnnnnnnnnnnnnnnnnnnnnnnnnnnnnnnnnnnnnnnnnnnnnnnnnnnnnnnnnnnnnnnnnnnnnnnnnnnnnnnnnnnnnnnnnnnnnnnnnnnnnnnnnnnnnnnnnnnnnnnnnnnnnnnnnnnnnnnnnnnnnnnnnnnnnnnnnnnnnnnnnnnnnnnnnnnnnnnnnnnnnnnnnnnnnnnnnnnnnnnnnnnnnnnnnnnnnnnnnnnnnnnnnnnnnnnnnnnnnnnnnnnnnnnnnnnnnnnnnnnnnnnnnnnnnnnnnnnnnnnnnnnnnnnnnnnnnnnnnnnnnnnnnnnnnnnnnnnnnnnnnnnnnnnnnnnnnnnnnnnnnnnnnnnnnnnnnnnnnnnnnnnnnnnnnnnnnnnnnnnnnnnnnnnnnnnnnnnnnnnnnnnnnnnnnnnnnnnnnnnnnnnnnnnnnnnnnnnnnnnnnnnnnnnnnnnnnnnnnnnnnnnnnnnnnnnnnnnnnnnnnnnnnnnnnnnnnnnnnnnnnnnnnnnnnnnnnnnnnnnnnnnnnnnnnnnnnnnnnnnnnnnnnnnnnnnnnnnnnnnnnnnnnnnnnnnnnnnnnnnnnnnnnnnnnnnnnnnnnnnnnnnnnnnnnnnnnnnnnnnnnnnnnnnnnnnnnnnnnnnnnnnnnnnnnnnnnnnnnnnnnnnnnnnnnnnnnnnnnnnnnnnnnnnnnnnnnnnnnnnnnnnnnnnnnnnnnnnnnnnnnnnnnnnnnnnnnnnnnnnnnnnnnnnnnnnnnnnnnnnnnnnnnnnnnnnnnnnnnnnnnnnnnnnnnnnnnnnnnnnnnnnnnnnnnnnnnnnnnnnnnnnnnnnnnnnnnnnnnnnnnnnnnnnnnnnnnnnnnnnnnnnnnnnnnnnnnnnnnnnnnnnnnnnnnnnnnnnnnnnnnnnnnnnnnnnnnnnnnnnnnnnnnnnnnnnnnnnnnnnnnnnnnnnnnnnnnnnnnnnnnnnnnnnnnnnnnnnnnnnnnnnnnnnnnnnnnnnnnnnnnnnnnnnnnnnnnnnnnnnnnnnnnnnnnnnnnnnnnnnnnnnnnnnnnnnnnnnnnnnnnnnnnnnnnnnnnnnnnnnnnnnnnnnnnnnnnnnnnnnnnnnnnnnnnnnnnnnnnnnnnnnnnnnnnnnnnnnnnnnnnnnnnnnnnnnnnnnnnnnnnnnnnnnnnnnnnnnnnnnnnnnnnnnnnnnnnnnnnnnnnnnnnnnnnnnnnnnnnnnnnnnnnnnnnnnnnnnnnnnnnnnnnnnnnnnnnnnnnnnnnnnnnnnnnnnnnnnnnnnnnnnnnnnnnnnnnnnnnnnnnnnnnnnnnnnnnnnnnnnnnnnnnnnnnnnnnnnnnnnnnnnnnnnnnnnnnnnnnnnnnnnnnnnnnnnnnnnnnnnnnnnnnnnnnnnnnnnnnnnnnnnnnnnnnnnnnnnnnnnnnnnnnnnnnnnnnnnnnnnnnnnnnnnnnnnnnnnnnnnnnnnnnnnnnnnnnnnnnnnnnnnnnnnnnnnnnnnnnnnnnnnnnnnnnnnnnnnnnnnnnnnnnnnnnnnnnnnnnnnnnnnnnnnnnnnnnnnnnnnnnnnnnnnnnnnnnnnnnnnnnnnnnnnnnnnnnnnnnnnnnnnnnnnnnnnnnnnnnnnnnnnnnnnnnnnnnnnnnnnnnnnnnnnnnnnnnnnnnnnnnnnnnnnnnnnnnnnnnnnnnnnnnnnnnnnnnnnnnnnnnnnnnnnnnnnnnnnnnnnctctctgcctctctgcctctctgcctctctgcctctctgcctctctgcctctctgcctctctgcctctctgcctctctgcctctctgcctctctgcctctctgcctctctgcctctctgcctctctgcctctctgcctctctgcctctctgcctctctgcctctctgcctctctgcctctctgcctctctgcctctctgcctctctgcctctctgcctctctgcctctctgcctctctgcctctctgcctctctgcctctctgcctctctgcctctctgcctctctgcctctctgcctctctgcctctctgcctctctgcctctgcctctgcctctgcctctgcctctgcctctgcctctgcctctgcctctgcctctgcctctgcctctgcctctgcctctgcctctgcctctgcctctgcctctgcctctgcctctgcctctgcctctgcctctgcctctgcctctgcctctgcctctgcctctgcctctgcctctgcctctgcctctgcctctgcctctgcctctgcctctgcctctgcctctgcctctgcctctgcctctgcctctgcctctgcctctgcctctgcctctgcctctgcctctgcctctgcctctgcctctgcctctgcctctgcctctgcctctgcctctgcctctgcctctgcctctgcctctgcctctgcctctgcctctgcctctgcctctgcctcctgagaacttccctaagttttatatgagagtgacacacacaaatttgtaactgtccgatgtgcatgcacaaatggataacaggacaaagaaggataaaggttcataggggagaatattaaaacagaaaagatgaaaaaaatattgggtgtaatctcagaagagcttgtgcattgaaacttgggtactgatgaagcagggtgtggtcatggtgagaccccgtgtgctgatgaagcagggtgtggtcatggtgagaccccgtgtgctgacgaagcagggtgtggtcatggtgagaagatcccgtgtgctgatgaagcagggtgtggtcatggtgagaagaccccgtgtgctgatgaagcagggtgtggtcatggtgagaagatcccgtgtgctgatgaagcagggtgtggtcatggtgagaagaccccgtgtgctgatgaagcagggtgtggtcatggtgagaagatcccgtgtgctgatgaagcagggtgccgccgtgggtgagaagaccccacgtagtgaagatgctgattcctccagagctgctgtgctggcttaacacagtttctctcaaaatctcagcaagagttttttgtagacctaggcaaaattatcctaaaatgtatatagaaagaccagggctagaataactctaacaattgtgaaggagctgaacaagtggcatcgaaagaaggatgaacatcagaggaatcagatagaaagtcagagctgagtcatacaagatactcactcacctgaggatagatagacccaaaagcacttacatgaaagaataaataagaggaaatactgataagtaagatgtctctaaaacctgcctagcagaaaaccttgttaggggtttgaaaagacaagctacagagtggaagagaataattgtaaagcctgtttgcaaaacagagggctagggaaactccagcaacaggaacaggaagtgatgctgttagagcatactcacgggtatatggcctggaggggtaacttagcactcacctcgcatgcttaatgttctggattctattccacacaacacaagggcactgtgagaaagaagaaatgggccaaaggaatagacattttattaaaagtggggggtatacaggacctcaagtatattttgttgacccatttaatgctagtaaagttgttttttgtttttttttgttttttttttttttgcttatattggtagcatatatttaagcattgtaaagtataatagaaactccagatttctaacttctcttaggaagaaatagaaaattcactcccaaaatacttccccaaatcataactgtctaagggttgctcttccatggaaggcttgtgctcctccgcactgtccccatcagtgtcaggtaacattctgagacactgaaaggaaacaggagccagcagctacatttttctccttccccttgtgggaggctatcttctttattgttacaattactgtaacatttcttgctaaagatttcctagtggtttctctggggtttcaacagaaggcttgtggctgattatagttcgtgtcttacatgatttggttcgtgtaagaggaaatgtttcctcagtgtctgattttctaatgagccattttagttctataactcagagcctcccacccgaccgactcttgctggtctctcttcttaggggacccgaagtggaaagactttcctgggttttattaactcggtctaaaggggttaacacaaaggaaatagaagaacgttacagaaggaatttactatggtggccatgattaataagctattctgattgagaaacttggcaacacttagcacattttgttacaaagtagacatcagaagtaaagccattatgtttgatattgaactcccaagtaacttggtattttctaagcacaatagtattgcgtactatggtacagttagacaggctgtttgtctgagcaaggagtatatggcagaactaaaaggaaagtagatggttagtgcaggattgaaggatggccagagtccatgactgtaatagcctttcaggctacctagagaagtggcttccgtgttctatttggcttttcccatggatccaaagtaagaatggaggactagggatataatcagtaggcgagcacttgtctcacgtggttaagacctcaggttccactcctagccccgtcataggtactaggataaggtggccactagagagatctctcagatgttaggacttgcggctcttgcaatggactggagtttagctcccaatgcctacactgagtgacccacaattacctagtgtcagctccaggagcatccaacactgtcttctgggattctctggacannnnnnnnnnnnnnnnnnnnnnnnnnnnnnnnnnnnnnnnnnnnnnnnnnnnnnnnnnnnnnnnnnnnnnnnnnnnnnnnnnnnnnnnnnnnnnnnnnnnnnnnnnnnnnnnnnnnnnnnnnnnnnnnnnnnnnnnnnnnnnnnnnnnnnnnnnnnnnnnnnnnnnnnnnnnnnnnnnnnnnnnnnnnnnnnnnnnnnnnnnnnnnnnnnnnnnnnnnnnnnnnnnnnnnnnnnnnnnnnnnnnnnagagcttggttataaaggtggctttctgaggtgaggctgggcctcagcaccctgcatatgctgacctcccccaaatgtggaaacaacccactgcataatttatggtattggggggctgctcccctattattatgaaaagaaagaaatatttagcaaagaaaagaaatttacataaggaaaagtagaaagagaaagaaagagatggaaaaatgaaagtgctacttgggattaaagctcgccatctggctgctaatttatgtgattgctgttggaaggagaggttctagtgaccttatgccccagcatctgtaagaaagaggataaaggagtgggtgaaaggagtggaatggaggcaggggtgagggtctgagtgtgaaatctagagctgaactgttggaattgtctctgtctctcactgtcctagctctgacctctccatgcttcagttttctcctctgtgagtgggaatcacgcagtctccgtaggagggcgatgttgtcagagaatgcagtagtgcccggtgcgttgtcagccacagcactggctgctggagaggacaggcacaggctcaagaatggcagaggctcgcacttgacagagccatgcttgggcttgggactttgtcatccgtgagtttttcctgatgtctcagtagaacacctatttctgcctttagatatttgtcctgacttagcctatgtgctaaactcagatagctcagtgtgttcaagacacaccaattcgtagcatagaaagaatactttggcaagaccttggccaggaaagagacctaaggttttatttgttcattcctaaggcccagcaaagagaagtctcccacatacaaggaattagttgactggcctcagcttttgctgttttgtttggagagtacggttgttttggagtactgttgctgctgttgttgtttggagacattcttacttaggctggctttaaactgtagcccaggctgagttaggctcagagcaccccctccagcagtctcttcagtgcttactcatagctcctgccttagcatcaagtcttttcagatatttgtttttaaagtatcattaataatagattttaaagttttgaagttgattttaaataggttatattcactttgccagaataaacaggtacatgaaaaaatatacaactaaataatgtatgcccagaaaaccgtagaactacgcgatgtatacaaataagatacaactaaataacgtataccaaaaccatatataccaccccctccaaaaaaacccatatataccacccctccaaaacccatatataccaccccctccaaaacccatatataccaccccctccaaaacccatatataccaccccctccaaaacccatatataccatcccctaaaaaaaaaaaaaaaaaaacctcgaccatagccagcagaaaccttccatggttttaattttgagtgttcagagccctttatagcagtggacctgtacaggtggtctggatcttcacggatctatttcctgtttcatgagcttgatggttgtgggaccacaggcaccagagcagtgatgcccaagtctgagaggctggagtcccatctcagggagctgcccttcctcctctcccagagctctgctgagctcatccgagtctgtttcggatgtaaagaaggaccagcataagcaaccagcattctgactcaagagagcagaaagaccggtttgaactgggtaggtggggagtcggaaagatcaagtccagggggaggtgacagattgatagcatcctgtgccaaagtcccaactcacaagggagtcagatgagccagggacccctcagcccttcccagagagccacggtttatttaggaagctctagaacctagatcaatcaatccccttgcactgattctcagtgtgtcactttcagcaacattttaatattcttcctacatcctgagttattgattgaacactctcatgttttttaagcccacctccttcagcacagcacccttgaatcccatgcatacttttatgattcctaaattggtagacgaaatgttagttacggacaaaaatacaatctcttcacacctggaaaaattaatgttttttttttccccagaaaaggtaccatatgatgggaggagaccagttgctatttgcttgtgagtggagagacggatgtctgccagacagagtaaagagcctgcctgtccctttcagcctcctaaaatattagtggtgcaacactgatgtaatctgaatattattgaatatccttcacattctggctactttcacagctgaaatctagagggaaataaccataatcaaattctcctgcttagaaattaatgttccgagtctgttttaggaaatatataataaccgcgctgtcagggtatgggaggggctgctttagaagatgcctcagaaaacttacaggccagtggcaactcaaatacagttctgggattgttagtgattctaagctgatttgcagtgcacatccttgtggctttggcagtttggtggggctctcaaacgccaaggcaacgctttatgtaagctatgactttaaagcttgtcataaggtagaaaatggggtcagagaagaacagtggtcagggctacatcactggaccacacatatgtagaagtccagaaatccagaagctttcagctcactgccaaaaagcagagtgtccagtctcacacgttatctgtgtcttcactcccccaaagcagcatgtgatgaacaagcctactcctgagcaatgctcatctctaactccatcccagcatcttggaaatgtatttaggccattggaagaatgccctatgtcaggtagagtgatggcttggttgttaagaacatgctctgttcttgcagagaacctgacttcaactcccagcatccaggtgcggcagtgtacaaccaactgcctgtaactaactcctgctccagaaaatgccttcatctgaattccataggcaccagctctcacgtgtacagaaacctccatgcagatgtatatacatatacacataattaaatctttagagaaagaatacagaccccatgacaagcaaacacaagcagtctgacatgcttctctatatggcacagagtgtggcttattctcatcttaaatcccaacaccccatagtagggtcagagaagaaaagcattgcggagtgagccaaaggctgtacaacactggaatctagatgttggagtcccacaaaaggacaggttactagttccacagcctgtctaggcctgataccttttcacttgtaaaatgacacagttgaactggacaggccttgagtgtatgcttcctcgactaacatgcataggaggaactggggtgtcctgtaaattgcagatcctgactcagtaggtgtgacctgcggcctgtgttttgttttcctgtagaggagtcctgatactgctctacaatgctcacactgctggtccactgatctctcagcgtttagttagttctgtgcatgtgtgtctgtcaactagatggctctgtgacattgcaggaaagatgggggctttcaccagtgaccctcccatggaatcaacagtcctcattcttcataattaatctctatcagacactctttactatgtaattatgcataacaatttcatgtgcacaccagaaagcactgatagatttagtcccagcttaccagacttgacaacagaagacagaaatatgtataaagacagtaataaatagtaagttatgatatatgcccattcagacattgagtacattcaaatagaacaagcatatatttagatggaccatagaatatttgtattcaacatcttttttttttccttttaatctctggtaaatgaagtatatttctgacataaaacaagatttctgtttctctcttcctggtgagagctgggagtggcaaggtcaatttctgaactgctttttttgaagactgactgattctggcctcctcagccccaaaccttaaccctgtgactgactgtgcagctgcctcggcttaacttggggttaaaccccgagtgtgtcctcacaggttcattgactgactctcagtgcttcctgtccagggctttgacccagccgtcacccttgtgaatcagcgtgggaagaagtggacagcactatctctgaatcacagagctgtgggcactaccgaggagggggccagcgcatccgaagcctctcggtcattatatcagaggaaggctggcttggtactcgctcttctgtacacacaggtctcatgacctagcctgaggatgggatcgaaggagcaacagtaggcagcattgacccctgaaggcagagctggatctactcctgagggccatccagacactgtgctggaaacaacatctggtacccatggtgataagccagtttattagaactgaatccctggttagaagagagatgctaggatgactcagggaactgatttattctaactcagcaaggactgaattatcacaggtctgttctatctactcaagggtttcccaactaaatactagtagtgaaattagaaacccttcatttaaccttctctgactcatgtgaacacatgtgataattaataatggtcctatgcacatacataggaatacagccatgcagagaaaacaatacataccatgccctcagcacacagacgtgcatccatgggaggagaggagtaactgtgaaatctgatacactgttttgaaacgtggccctaccactgcaggctgcatcagttcgcctttcagactgcagctgttccacctgcagggtgatgttggcgtggcttccgtgcagtatgtgtgtgcactgtctgaggtgcagatgggtggagttatgtagcatgatgtctgaaaacctaatcacagtcagcaaccataagaaacctgattatgtgacagcccctgtgaaattgtgcctcaggggaaaaaatagaaagaaagcgtccacgtttgtgtttgtctcttgcttcgtatgcaggcctttgtgcgggaggttgtgtctgggttcataaaatgtcacgctgcttattaggaatgaagctgtggtgaggacaaagcctgcattgattaggtaggctcagccctgttcactcagttttgtcacacgtagctgttgtttccctgttaactatctatacataaacctagcaataaagggtgaaagcagcctgctcatattaaggaaaacacgaacccatagatgattactgaattggaaagctaaatcttaaaaagccataaatgacagtccatctactttgcaccaatgcctcttactgtctctctgagcatacagagttgtacagacatgacaggatgccgcacatcccgctaaccgctcacagggaggtaaggagaatggaggagtgggtctggactgtggtcctgggaagagaaggatgccctccacgtgcagccagggagaagaggcacgagtaggagcggtgctgacgccttccacccgtgttagaagggcatgaagaccacaggcagagggtgtgaggcagacttctaaaatgcaaatgatccataggggccaaatctgagcgaggccttggacgggccatcacctcaaacctgctcacacagtgtctgaacagggtgttactgcttctatgcagggagagagttgttcatcttaggttgaatgtaacagtagttaggacagttagttctttcccagatttattgtgcacttgagtcatctgtgacagtattaaaatgcagatcctataggtctgagacctgcatttctaaagagcccctaggtattgctgaagctgctggttcaaagactgtattttgagtaggaagtgtctaacccattttctccccgaactctctgtttcccactcccatcctacttacttctgttcctccctccgtacgcccgtgccgttccttcactctttctctgatagttgcttcctgcttgctgacctaactctcatgctgtctcgtggagtcactcttgcatccagcctgagtctttgcttagactttccccctttcttctttaagcgtgcatactaaagctccagtcctccaaaactcaccgtttcctgagtccatcacctcccttctactccgggtagggctgagagggcctgcatggccatgctccaggtctcatgtctgctgctccttcactcctccttccttctgtataactgcctgccagtcatgttgtcgcaggttgaacctaagtctccatagactcaagtctggagagcttgttcaccagctcggggactgttttggaaagctatggagtgtttaagggatgaaggctggctgggacaaagcactagggacaggctcttgggggtttcagccaggctctggccatagttcagttctctgctttcctctgatccatcagtgtgagaagctgctctacctcatgtcctaccaaaagaaggaaccaacagcttgccttccccaccatgatggcccacaatccctctgaaaccatgggtcaaatgaagacttcctcctgttaagtgggttacctctggtagacagctcagtctccagaccttaagtccttccttcccctcccccactgtgtgctaacctcccctcccccactgtgtgctggcttccccccccccactgtgtgctggcctcccctcccccactgtgtgctggcctctcagcccagcccctcctgctcctgagctttcattccttcagtgagcaccacagcagcccaccaggtggacagctcaacctcttctctaccactaagctccatgaggacaggaaaatctgtctgtcttcatcagtatcaaaactccaaggggccacagtgacgggtatatggagagatttaaaatagttgtagttaaacagaattagaaaaacatatatttaaagccctcttgatctttcaatagctaggactaaggaatgcccctgtgttagcactcatttgaatctaaaaatgctgtttagtaaaaactgttgagcctaccaggccctttgaagattaggactaaaaaatgaccaaaattaaactctcttcaaaagtttctgtcccttgtctcagtcaaggacctcaggaaggttgctggctaaagtgaggatttagtcaacctcattgctcttctcctgggacacaacacagagatgcaagcagtcagcacttaatgattctggcctggcctctgactcctgtggtcctcccagcaagagagcaactgtctgtctctaagatggcaatgacccaagtcacaaaatgcaagatcttccattaagaacccattctgccacttgctcttaaggacactaacagcgaaggagactgatgttcatagacgttgtagccatgcttacttttagtgtactccaaagtcacatccatgctaacgatgttctcatttatagcctgtatgatggcctcctgactggatgataggagatcttaaagcagttgcattatacattccctgatggctgagtgtgggacttgtttagctccatagcctgattttaaatttgggtcatttgtattttggagtttggttatttggattccttatgtattccagatacagagttggaaaatatctctcccaccctgtggggtacctcttcattcagttactcatttcctttgctatacggaagcattggcttcatgaggtccacttgtcaaaagttggtgtaatttcctaagccactagagcgctgtttaggaaaccctatcctgtgccccagtgttgaagcacattccggggcatcatgtcttacattgaggcctttgatctatttgtaattgagttttgtgtaaaatgaaacacagggatctagttttttttataatatgttgatgttcaggttttccagcgccatttgttaaagacactaacttttctcagatgcatatttttggcatcattgtttaacattaggtgactgtaattatgtggacttatatgtggatcctctattcttttccatgacctgggtctgctttgtgccaaaaccattctatctttcttactatggctctgtagtattagttgaattgagtgtactatctcctgtagtattctttttgttcggaattgttttagctagcattgacttttgtgcttccatataaagtttgtatatatctgcaattttgattgaggttttgaaagaacctagtggggaaacccccactcagctcccgattcggcgtgtacccaagaatcacgaatagaacacaacaccttgatgtaacaacacgaggtattttaatggcggagctccgggtcgaaacgtatctcacacaggagacagtggattcgaccacgaggcttggaagctaggggtttttatagaaaaggagtggggctgggggaggaattggcacggtttcacatgattggtccatttaaacatcagcagcctgtaacatttaacttaggtcagaggggtgggagatagggaggcgatgggcctacccgggcatgtcctggtctgttctgctatgttctcagccccaggtttcaaagctcacaaacaactctttgggctatttgacatacatcacatgaatcacaggtctcaagttttatttcctttcagtttcattcaaattaataggttgttcttagtagaggggctgttttcacagtagattttcttccaatccagtagtgtataaggtctttccatcttctagagttttcctccgtttatttcttctgtgtcgacattatcatcctggaggtctttcttaccttgcttatgttgatttcaaagttgtgagcagagttgttttcttaatttctttctcagtatttttgccgttgggatataaaaaggcttttggctatttacattaatttctatactaccatctttctgaaagtgtttatcagctttaatagtttctctggtggaatctctaaagtctcttttgcataggatcatatcatctgcacaatgtatcaaggatgcagtgacttacttcttttcctatttacatggcactacttccttttcttgtcttactactgcagctgagacttcaagaagtctgttgaatagaagtggagagagggagcagcctggacttcctactagtcttagtggcaatgctttaggttcttctccatttgcatgatgttgggactttctggggcacgagcttgcaaataatgacacgaagactacatttatttatgaatgcctagaacttaatgaatgctagacttgttcctgactagcttataaccaattatcccatttatacctgtctaagtttggccacatggctggttggttacctcttcttccttcctggcctgcttcctccttcatgttccactgcatctccccatgtgagatcttccccagagttcctagctctgcctggaagtcctgccttcctatctttcttgctttgctattggctaacagaaaggtgagagaaaatgtttgcaaaacaccgagacaggtcatacaaggtcctacctgtgctgaaatctctgcaggttcagaaaccagcatttgtctaatacagagacaatcttacacagtgcataaaaacgtcactctgataatgctggctttttgacaggtggcttttttatgctgtggtaggctttctccattcctagtttctctctgacttttatcaggaaggcatactggattttgtggaagcctcttctacacctgatgaaatgattctatgattgctatctgagtccatgaaaatgacagattacattgattgatatatgcatgtcaaatcatctctgccttcctgtaatgaagcccattggatcacgatgaatgatctttttggtgtttgccagtgttttattggaaatttttgtatttgtgttcatcagggagatatgcctggaattttctttttttgttgttgtcgtcaaagttttagtatcaggttaatactgacttcctaaaaagaatttggaagcactcattctttcctttcgtgttcttgggaatgatttgaatagtaatggtgttagttcttctgtgaagttttgatacaattccactatgactgtatatagtcctgggctattttatagttgggagtcttcatatcaatgctccagtcttattgttggctatagatctctttaaattacttcatcttggtttaattttggtaaaccatatgtatgtaaaaattcaatttccaatttagtataatccaggtttttatagtcgatccttatggtttctgagttgcattggtgtgtatggtagtgtctccctttcgtgtctggttttcttgcttgtgtgtattctttctctcttagttaagttgactgtcaatcttgtttgtctttataaagaactgacttttcatttcattggttcctcgtaatgtttcttgtttacttgtatttcattaatttctgcccttatcttaattatttcctcccatctcctgcattgggtagttcttgtttttccaggacccaaaggtacctcattagtctgcttatttgcttaaaattcctgatgtaggcaccgagggctggaaatcacagccgcctccattgtgtcccatagatttggtcttcatacatattttagaggttttgttttttttaattttagaggatttttttatttcttcagtgagccattcattatccaatagtgtattgtttggtgcccatgagtttgtgtgttttctgtggtttctcttactgtggatatcttgctttattctatcatggcgagatgcaatatataatgttattccaatatccctataactgttaaggattgctttgtgtcctaaaacatggcttctttgggagaaatgtgtgtgtgctgctaagaaaactgaactatttagtgtttgagtggagtcttgtatgtgtcttcctagtgtcctttcacttatgccttcatgtaaccccaatgtttcttttttgtctggatggcctttattggtgacaatagcatattgaattccctcatggttacagtactggggttaatctgtgactctacacatcgccgtgtttgttttatgaaattgagtgtacctgttaagtgctgttctctaatgagacctggacatctgggaccaggtcactagctgtgtcttccatggtgtggtttcagcccccgagccagtatctgtgagagggcagtggacagggtagcttgagagaggctggagtgggacagaggcaggctggggcggaggatctgttccacgccagtgtggtaagtcagcaggcagagcttcctgggtcatctctacttggctcgggcatcattcccaagttcttgtttctgatgctgtcttcagagcttgcaattccctcccctgttaaaatgatggttttctggttggtgtggaaaccttccagaagccacagtgtcactgaggtgtgacctgagtagttctgggttgggattttacccagcagatggctgagaggagtttccatgggctcacatgactgaaagtctgaaggcagagacagcaggcacggctgctaccttctcctgacttcctgctgagcaactttctcctggaatacacaatcaaaggctcttagatcacatggccagggcttgaactgggatgtagtggcaagctctgaccttactgatttccacagagtctcacctgggcagctcatggcaggaccatcacttcctcgggtggaaccactgtgtctctttgccgtctctcagctctggtcctggtggttcccgtagggtctcacctgggcagggtctcacctgggcagctctttgcccactctaacattgctttccttatcatttatttctaaggaacaatttttgtcctttcctttttaaactttaccaaaacagaaacaaattgaaagcataaaagagtccccgttttacctcaggattcatcctcaagcaatctccaccagctcttatgtctccccactctgcaagcgtctccctccatgacacaaacttaagaagtctacacaagaaccatcgtacaaagcagggttttaggtttgagttcaatttctcaaattttagtcacacctcttgcaggacaggatctttataagtgatacaatcttactgttaataagcataaggcactgtattaaacagtgtatttcaagttgaaggagtaaatagcatggctagatccatgctagcaattagcacatggttcttcaccctttcatttcatgttccccctccctccctctctgtctctcccaatctctctctctctctccacctattctccctccccacctctccccctcnnnnnnnnnnnnnnnnnnnncctccctctctccccctctctccccctctctccctctctttcagtatatagctgttttaaggctgtggtacattgcccattgtgtaggtctgcggttatgtgtgtgatatataacacatgcctactgtaggactctgtagattgagaagaggaggaaggaagcaattattcaaatatggcagagacataactaaatggctcgtctgcagcttcatttctgttccttccatggatatgtactctgtgtccatgtgtacatttatcttatctagaactgttcgtttagatttagattggcttgtgttatgtgtatgagtgttttgcctgcatgtatatgtgtaccacaggcaggactggtgctcatgaaggtcataagagggcatctgattgcctggcactgacgctaaggagaggcgtgagtcactggcacccgtgtccaaggtcagaactgaactcaggtcttctgcaagaacaagtgcccatcaccacaagtctgtcgactatgggcaggcatttcaagttttgtctttaggactcctttctctgtagtactaaaatgctacagcttacgcttactgatcaatttcctcctttactgcagaacttttaataagtaaaggagaaggtaataactcttttcattcttttagttttagtccaataagaaatttaaaactatgttcctcttattcctttctagaacacactgggttcttctctgatttccacagtggagcacaacttcaaagctgggagttggtgagttcaggatatttattcatctaagtcaccatctttaatattggtcattcaagcttgctactaaggtaactctgtatctagccaccctgcatgtacagatgcacagctccagccaggtgtgagctagcctgcactcacagatacacagctccagccaggtgtgagctagcctgcacccacagatacacagctccagccaggtgtgagctagttccaccttagatgtcacaccatgaccactgtgccacaagggtaacttgtctgttttatgttgctctaacaaaacctgatagaaacggcaggagatgtgtgtttggggtcacagtggggtcagaagcatcatcacttagtgaggcggattgaagggcatggtgggacaagctgctccctcctagcagtgaggaagcagagagccagggaggaagtgtgtaaggacaagatacagcctttcgaggcatcgccagcagcccacttcctctgagccccgcctctgctctcataactctgctctgctctgaactcataactgctgaatccattgatggaattcagccctaataagtcaatcacccctcaaaagctccacccagtgtccaccaggcgctgacacatgggatatttcctatcaagagacaagagaccaagacaccaacaggcacagttcctatgccatgggacttcaagcagtgtctggctcagtcctcattctgcttcttggtgcctccatggagggccagtgctacctcatctcagtctctttcctcattctgagatgagaatactaattgcacagactctttttttttcttttttttataaggtatttatttcatttgcatttccaatgctatcccaaaagtcccccacacccactcccccacccactcactcccacttcttggccctggagttcccctgtattgaggcatataaagtttgcaagatcaatgggcctctctttccactgatggccgactaggccatcttctgattcatatgcagttagagacacgagctccggggtactggttagttcatattgttgttccacctatagggttgcagatccccccagctccttgggtactttctctagctcctccattgggggccttgtgatccatccaatagctgactgtgagcttccacttctgtgttaattgcacagactcttgagctctgtgaaggatgaccagtatacacagctctccccaccactaccatcatcgggaccatgaggctgtgtttactgtgaccatgatcagtactaataccagttacatcggaaacccctgagtgatctgggcttggacagaatcaaaatccagcgtgaaatcctcgagcctaagcaaacgacaagtcaacgcaaagaccttcacactaggtttagcaattgcattactacaggttatcactttttaaaatgaatcctggaccttgaagtgtcattttcaccccatttaaaagatttagaaatctcaagtgtcctggcctccctgacctgctcccattacagaccatcattctgggcctctcnnnnnnnnnnnnnnnnnnnnnnnnnnnnnnnnnnnnnnnnnnnnnnnnnnnnnnnnnnnnnnnnnnnnnnnnnnnnnnnnnnnnnnnnnnnnnnnnnnnnnnnnnnnnnnnnnnnnnnnnnnnnnnnnnnnnnnnnnnnnnnnnnnnnnnnnnnnnnnnnnnnnnnnnnnnnnnnnnnnnnnnnnnnnnnnnnnnnnnnnnnnnnnnnnnnnnnnnnnnnnnnnnnnnnnnnnnnnnnnnnctcctcctgctcctcctcctccttctcctcctcctcctcctcctcctcctcctcctcctcctgctaactaaggctaaagaatatgtgcttaacagctttgattatctgtgctccataaatgccttcctctgatctcccaacatttgacaagaatctcaattcagggattaaatactttttctacagcactgtttcctctagagtaactcgccttacacatatagtgttgacctaaagtgcaggacgttctccagtcagggatcattcagctttaacagggaaccatgcattttggaatagacttcagatgcatctctacactcaaggcccccagtgtctgcagagcactgtctgctccctttctgcccatggcctgactcttatgcttttcagtgaagatagttttctgtttgtcatttgtttttctttctaaattaatgtgaatttgcagtttgttctctgttggatgagattcctgtccccaatcctctgataacccctatttgagtgtctcaggcagctccccaaatgacagggaaactgcctcccccacctggctctcttcccttctgctagcagctgattgcttttactggaatcaatactccaattaatggcatccctgttgacccagtactcaagccaggaatctctgccctggcctggcttctccccgttcagtccataccagattctggatttaagattatgcaaaagtttcaggatattggtgcttagagggtcacataattgctgttactagtattcattgtgtctttctgaccttccttttctctgctgccgctggtcagtgctttgttcctggccttcacacatgcacatgtgcacatctgtgcagatcaggtctgaaatcaacttctgtagcttctttcagagtggctctccctgactgaggaccctgctcacgattcccacacctctgtgcctttgtcacctcaactgacccagacacctggctgtgcggccctgtggcccagtcctgggtacccctccagcatgctttaccctgctccatggggctggatttccttggtttagttttttcaaggcagggtttctctgtgtatcctggctgacctagaactccctctgtagactaggctgacctcaaactcagaaatctgcctgcctcagccttcgggtgctgggattaaaggggtgagccaccatcgcccagttccagggctggatttcttgaagtgttctagaatgtcatgtctcttaagacaaacatgcgcaagcaagactcagtgcacacagttctcatttctgagaatgttctgcccaccaccaccaccatttcttctcaattctgaagcatccttcaagacccacctcattctccatctcctctgagaagctctccttgatcctctaggtaccacaggatccagacagttcattagctgcatctcagaccacactgtgttcttgttagccacctgtatatagccttcctatggatgctgagctgcaaggcaagattctaatcctatctttgtacctacaacatctagttactgtctggaccattcaggtttctatggatgaagcatctccaacacgaataaagagaaggcatacatgagaagaaattgacctcaagctgttcttttcctctgacctcccacaagctccttctcaacgatgtagctttgttttctccttttgattttcatatccgtgtttgaaggaagtaccaccaaaacgtatccaaggcctttcactcctctgctgatatcagagctaaagtattggctacattcttcctaaacttgaaatccggtactgttttctcatgggaaaagaaggctcagcctgtgtctctagcaccctgttgatgatggtggcctattctgtgatgtttaatttgggagcaaacccatttgcaggcttccattgtgcctgtgcttgagatatgtgtcccatgtgttcagtgtttcctgttccccggctctgagaagacagaaattacttcccagggaggcgtgggctctaagttcaaaacaacactgcatttcatgaggagccacagttaacacagtggtgagctgcttagttggggatcgagttttaattcattccaattgtaggcaagagcctagatgccctgaagtggccttacagtcaaaggttactgcagggcaccgcagaacgtcccacaactgttcccactgctttgctgtgcagcgctggccaggtgaaggcagcgtgaggaaatgactgctctctccagcttctctctgaagcttggcactttggctcagaaacttgaggctaatatcagcatgcactgttagctttacttttgagagcagttcatttgaatagcaacctgcctgtgtcttgaaaagcatccaaaagcagcaaggaaggttcggccaggaatctgaaacagtaaattagctagctctgagctagcagtcaacagaatactttgcagtcggtctcattaattttttatttttgcctctcttttcccatattatattctaaatcataagaaaatatgtctgttcacttcagatagttgggattttttttttaagtttcttggttcacacattacccagagaataccactattgccaagcagctaatagtctcctgacagtttcccctaagcccttacagactttgaatactgctgcggggaggggggggacggggggggggnnnnnnnnnnnnnnnnnnnnnnnnnnnnnnnnnnnnnnnnnnnnnnnnnnnnnnnnnnnnnnnnnnnnnnnnnnnnnnnnnnnnnnnnnnnnnnnnnnnnnnnnnnnnnnngggacggggctttataaacataggagaatcgcagagcagctccctagatactcagaaggcagagtcgcagtagtcaaagcttcctcactctgcctgcacccgtcctgcactcttccaaatttcctcttttagagacatcagctactactctttaaggagaaaagagaaaatgcagtgctcgaggccactgggaagctgttactcgctgtagagacatgcactacatgtcactgttgcagggagcacgtatggtcttccactcggggcgcattggactggaaaggacgtgtaaagctcaggtctgggtgctattggttttcctcttacatcagtgtttccctggagcacagatttatttattcataaagctgagatgatgtcagacaggagttacggcaatgtcaattcatgctgcagcctgcataggaagaacttttataagattcaaaatcaatgtgctgatgccggctctggaggcatgtgccactacacttctgtgtgtgaggggacagcacgtaattaaactccgctcctgctttctgaactactttgcatatgactgcaatatagctgaaatatgactgaagcctgcctttgccagatagacagattagcaccccaagctggccaggagcagcaccagccctgatcctttactgacactaagtctgtcagctcacatgcctgtggcatgtaagtgtgcctctcagtgcagatgacaagcgtggtcatgacatactttacgtattggttggcttgttaaaatacatacagggtgtctgtgtgactaaaccgtatacatcttacagaactgtggtggtttgaatgggatgcccctcatagtctcaggcatttgaatgtgtggttcagttgctgacactgtctggggaagcctggcgggtgtggccttgctccactttgctccctctgtctccgggctatggtttgagatgtgagccctcagcttctgctccaggcagtaaactgctgctggctgccatgccttcccatccagtgatggtgactgactcctacttcctgaccccttccttctgtaagccccgaataaagcctttttttgataggttgtcttagttatggggttttgtcatagcaatacaaaagtagtaagacattaatgctacaagtgtttaccccttgcttgtaaagagggtttggggagccaggcttccctcctcattcctgtttgttccttggcgtgtgatctaagaagtcttgctcacatgcgtgctacgatgtgttaccttgccacaggctcaaagcgactgggttacttggtcatgagctgcacttccaacaatatgagctaaaattatcctttcctctttaacaattaattttatgagtttgttgttgttgttgttgttgtggcaatgaaaaactaacatagtggtcagaggtagcttttagagttatctgagcaagactggcaactagctgtggatcagtttgtgtcttccaaaatagtctatggaatcctaaatctctgttgccatagtgatagtaaggagggtccttggaaggcaactaagtaatgaggagggaagctgtcattgtaggtttagtgatgacgacaaaaagaactgtttactggaacccaaacatgctggcaccctggtccatcctgatcatggatttcagctcctaaagctacaagaagcaatacactgtttagacattgtaccgataagtcttgatactgtagtagcagccaaggtgattaggaagcgctcgatgtgtacctacaaagcatgaacacacatctgcctgtggagtcgtaggcagattggaagcatgaagctagcatctttaagtcttagactatctggtactatcatatacatcaaaagcttaataaaaacctgttaactggggaaaaaaaaaacatgtttaccctttgtggataaaagtatctaacaaatggaaatttgctatttaatatttggcttttgaatttatttttaaaactacatgtcaaattttccctaaactggttgtttttctattggctgaaaagctcatctagtgacagtatcaggacatagaattctagggacacaggtgacgtctggccttatctgcttcttgccctgtgtgacctaaggcaagcgcctggattctctgggacgaaggttcctgatttaaaacccagtaagcagcagcctgtaaactggcaagcactcacatcttggtttccacagtctttcacacatctagctcatctctccacttcaacgtagctcattggtgtttaaagaggaaatgaatgagacagaaggggtagagagatgagaattattccctctggaagaattcagtttgttccaatttcaacgatctggaaactcagcttctagcagccccatctcccttagaaactgtaccaggaagacacccggtggggtggagactatgaaccttacaccctgtgctgacagcatccagatgtccttggcctagggctcaaaccctttgcctgaggttagggtggtctgagttactgttcccttgaatctcagttcatgacggtagctggtctctgccttagcttgagcctcactcagccttggacactgtgtaaattgcacatattgcagatgtttctaggtccacccaagctaatgcaggacagagctttatcctggcttccctggctggggactccatggttctaggcactgtgcattctgctgctagtcagcagctactttctgttttgctggcatgggaacccctggaggtcagtgtgccccagaaagcttccagctccaagaaaaaggctttggacaagagcctcattacccatccttgaggtactacagtggtgctggctcgacaggccagctggacgcatgccttgttctgctgacagacagagagcctgagggcttcctgtcctggtactattgatatactcctgtgagaaactttaccctcttctcactgcctagctccaacacagtggcctgagtctgatcttgttctgtctgggaatataattaccacattgtctgctaatggctgtattttacataataatgaatccaacttcttctaccaaatctacttcatttatgcaaaatagatataatttggaatgtgtatgaatcatgctattcttttggggatcagagaagctgttggagagtctgtaaaatacaattttctgggctctcttaaggttaacaaaagaaaatgttggttttgtgtttaccagagacagtgtttattgcctttggatccttgtggtctttgtgactcccactttgaaggagaaagatggtctctgcctaccttttacctctgcagtaatgcccttgatacaccagtgatctggaagcactaggaggcttgctcactgatttccagtagtatagaatagctactccaaatcaaacctgactattaacaaggaaaaggaagaaaattaaattagcagagagatacagcaaagtcctttgaaagtgcgtgacatgtctttatatgtgatccccatgagaaactaattttatcctggaaagaaaacatttgtctcctgaaagatgacaaaatactttgctttattaaagacaatggattattggtcataaatggaaaactgggaattcttgtttatttaattttgtcatcaacttgtggttcattgtcaaaaaaataaaaataagagtaacctgcaagactaccatccctgcctggtgtgcagtttggttttcgggtatagttaattgtacatattaatttaaatgtcaggcatatgaatgatagctgaacattgtagaagttcttgatcttggggcttttagtgatcgttgtcttctatgtgaacttgaagcacagatgcctatatccttgaaaacacacatctaaaaggccatactcggggtacgctcccctggagagcaatagaaaggaacttttcgatcatacacgggtcttctttttttatagattttttttaatatagtatattccgtttacagtctctcttccccagatcctacttacccctctccccaaatctgcattttttctttctctctctaattggaatagaaacacacacccaaaaaagtaataaaataaaataaaaacaaaccaaaatcggacaaattaaatgggtgaaaaagaagagccaaagaagaagcctaagaaacacatttagatggggacacatatccacacacagatgggagcacatatccacacacaaatgggagcacatatccacacacagatgggagcacatatccacacacagatgggaacacatatccacacacagatgggaacacatatccacacacagatgggagcacatatccacacacagatgggagcacatatccacacacacaaatggggaacatatatccacacacaggaaaacccattaaaacaaattggaaaccatgaactataaggaaaatatctgtagagggggaaaaaacattgttaaacaaaaacaaaaaaccaaaaaaaaccaaaccctccaaaagtaccattggccatcatctaatgctgatcgtgggacctgtccttaagtgtggtttgtatatccagcgagactccactggagaaaacaaattttgctttctaaggagttaccaattcaagattaggagctcttttcaacttcccctctcagtaatgagactcagtctctgttagagctatgcaagctctgtgtgtactgccaccgtctctgtgaggtcatgtgtcacaaaatcttaagccaggacctaatgccaattatctagcacagaaacaaacatttgctcatttgaaactaataatctactaatctgtattcttttcaaaagcaagagctcaaaacagtgtgtgcatgtgtgcacatgcatttgtgtgtgtgtgtgtgtgtgtgtgtgtgtgtgcgcgcacatgcatttgaaggccagagtttataagaaaccttcctccaatgctctcgaccttatgttttgagaacgggtttctcactgccaccgtaagcttcagcccggactctgacctttaaagccacacgaatgtgttgaaggcctagttgccaagcttgactttgctttggaaggcagtggactaaggatgatggtagcttcagaccattttctgaagaacggggtgcacaaagcaagttttacatataattgtaggtgctttgtggctcctcctgggcctggccatttatataggacccatcctatatagggcccaatctatataggaccctgtctcctatcttccaaccagtagctagacttaatttttgtgctgaaaaatcttcatgctgcaacatctgacattagtatagcactcatagattgtataccacactgcagtattctcagccagccagaaggacttatcaagtcctctcaccatggtgctgacagttacagaggaaacagccatcgagtttagggaaatactcatggacaaaagaagatttttacacatactgtttgccctttaaaaactttgttttcttgagctgtaatgcccttggtggcttaagacacaaatatttaatccattttctgagtatagctaattcatgctagcatttggattcttttagaagaatgagaccctggctttagttccatttagcagtgactgatggatttaaataataggtgtatttcatgtgattgttaaacttttcaaccctggtgagagcattgcttttacttcaacttagatcctttattcttctgtagtcaatgattgtcttgtgtgttcttccacatggaaagtaaaaaagtaaaaatgtccagtcccagcagccaagtgggagttctctcacagaaggagcagtagaagtgaatattgttgacagtaaatgtggagcaaaaaaatatgtgagaagtggggctgtggaaccagaaaggccgagacaagctctgcacgggaggggtggctcaccctggacctcagtgcatacatagcactcccttacagcgataacaacagaagtgcctttgcagagcctcgcttctttgcagagttctttttattttctgaattctgccacaactaaatgcttgttaaaacataacttaccacagtccccaaacctagccagagcacacagagaggagcccagagctggccagcatgtggacagccactgctttctcctttctttcttcttcaggggaaaggcagcctagaagaaaccagtggcgttagtctgggcccttttaaagctctgttgcaaatccagcagggaggatgtcttggacaagaccagcccatttttccagatgctgtaacagagccacacacagcagtgaaagctgcttttctcgaatctagcatatttggggtgtgagtgtgacatttggggtgtgagagtggtcgctagtgagaggtttaggaccaattggccaggctataagatgtccactccaccgactagccgtgtcacttgaccatgcttcttagcaccctctgtgtctctgcatcctagttcataaaaggaagagataataatagcacctacttatgaggcttgctgttaatatattctttggcccactcttagctgtaatcatcattactgtcatttgaagtcaaagcagttgcactcagaggttaattaacttgccccatttcacacacagtgtgacccagagcctggggctttgcatgtgtcccactgtaaaccctgcacagaggatgcactcatgctgccctgaatagaatttcagaattgtgtgatcaagcttcattgcagaccaacctgttttatgtatgttctctgcagaccaccctctccatcccagattttcacttgtcaaataatcccaggttgacagcaatgcatttggaaacttactatctataaataaagttttattgggacagcataccctcctccttcagctgtgtgtctaccttgggcctgcgctgaccaaggtaaagttgtaaaggaatgactggattctaatacctgaagtatttatgccctagcattttacagaaaagtgacgagtttcctgatctcactgagtattttaatctttcctgaggtggtgatgcttaaattatagatacctatcaaattcctctacctccacacccgtgtcctcctaagactggcagctaccaaatgctttgtgtttactttccactgggagtcaactcatcctgggtttcctagccccattaagaacactatcatgtgtcagtgtgccaccttgactaccatgtattagcatgacactctcctcttctctgcttgcagccaatctattaggaatgcccgtctgttgattatcctaaatgcataatctgcctcaggacattggacatgggcctggacctctactgagccaatgctccccattccaatgtattcagagacagtccagaaattactcttgtgaaggtgtatcagataatagttagtcattgatacatctctgcccagagagaaaggtccattgctgagttgtaggcatggtttctgaaggaagaatttggaaatggtagaaggttgaatatccatgtctataatttccttacttgaacatatagggggaaatgtggctatctgattgatcaaggtcatactttaaaacgctttgtttaatgctttgaaatggaatttgataccaggcctccttgactgagggtaaggagttaaaacccttaacagacagttttttttttttcttgttgctccaaagagcacagtcagataacaaatgcattttgatcctcatcagtattatgtgaatattattgtaaagctcatgatattattagctctgcttactcttttatgaatttaaattatcctctgataactggtaaagagcacagaggagtatcctacaactaagatggaagcacaggggattagtggctaattaaaacccactcagtgccttagcagctttgatcttggcatttgtttcatccagcaaacattttcatagtgccttaatttctgtctctatttgaatcttgggcaggagttgtctttgtttcccaagaacagcagatatgttgacatcacttacatgtagagctgagaccataaattaattctaattcttccagcaaagatattagtctttgtgtaacaatatgctctcaacaataacaggtccaatgccaagcagtgatcataaagattaacttttcctttggttagggataatataatacatctataagtgtccccaaatatttcccaaactcttaattatctgtagactgtcaaagatatattttgataagacgtataaagaaaaagtatagctcaataactgtcaaattaaggataattttacattccaatgtagagaaagatgtcacgcaccctcagatgtcaaaattgctgaaatacttaaagaagctagcaggtgtttgcaagtgttaagataatgcatagattcaatgcccttttcccagatgccccctgtagtgttcaccagctgtcaccttgtcactatttatagacaggagaccatggaggcctcctatctaagctgccagccatttgggcatctgggacaggttgttgtttgttttgttttgttttgttttgttttgttttgttttgtttgaaacagagtctatctgtgtagccctggctgtcctagaacttcctaaatagaccaggctggccccagactcacagaaatccttctgcctgcctctccagtactaggattaaacgtgtgcaccactgcaactaggttgtttttttttttttttttcgttttttttattagatattttctttatttacatttcaaatgttatcccctttcctagtttcctctcagaaaatcccctatccactccccctccccctgctccccaacccacccactcccacttcctggtcttggtattcccctgtactccggcatagaaccttcccaagaccaaggtctgtcctcccattgatggccgattaggccatcctctgctacatatgcagctagagacacgagtcccaccatgtgttttctttggttagtggtttagtcccagggagctctaggggtactgattagttcatattgttgttccttctatagggctgcagaccccttcagctccttgggtactttctctagctcctccattggggactctctgctctgtccaatagatgactgtgagcatccacgtctgtatttgccaggcactggcagagactcacaggagacctgacagcaaaattttattggcatctgcgatagtgtctgggtttggtggttgcatataggatggatccccaggtgggacagtctctggatggtcatttcttcagtctctgctccaaactttgtctctgtaactccttccatgggtattttgtttccccttctaagaaggatctaagtatccacactttggtcttccttcttcttgaggttcatgtggtttgcaaattgtatcttgggtattctaaatttctgggctaatatccacttattagtaagtgcataccatgtgtgttcttttgtgattgggttacctcactcaggatgatatcctccagatccatccatttgcctaagaatttcataaattcattgtttttaatagctgagtagtacttcattgtgtatatgtacaacattttctgtatccattcctctgttgagggacatctgggttctttccagcttctggctattataaataaggctgctgtgaacatagtagagcatgtgtccttcttaccagttggaacatgttctggatatatgcccaggagaggtattgatggatcttccggtagtactatgcccaattttctgaagaactgccagactgatttccagagtggttgtacctgcttgtaataccagcagcaatggaggagtgttcctctttctccacatcctcgccagcatctggtgtcacctgactttttgatcttagccattctgactggtgtgaggtgaaatcttaaggttgttttgatttgcatttctctgatgattaaggatgttgaacatgtctttaggtgcttctcagccattcagtattcctcagttgagaattctttgtttagctctgagccccatttttaatagggttatttggttttctggagtccaacttcttgagtgggaagtaatgcttattttataaaaggtgtggtgtggaaagtgggaggattccttcaagaggcctgccacatggcaggctctgggaacaaggcagcattggtgactgctgaaattgtcatcatgtcggaggcttattatcataattatacaacacctctgtcacctgcagagggtccagtgagtgacaggtagacgagtcatctcagtcttgattggtaaatatgtttctctgagatattaaatgttctacatatgagatcatgatttggtgtcatggagaaaaatgtgtgaaaagctctcacagaagtttatttttcaaaaattgggaactgcctgcttcagcacatagaaatgactagggatataaaagtgcacaatagtttataatttttatagtgatatgcaggaactctttttgaaacatggtgaagaacttttgacgtacgtcctagttagttttttgtcaacttgatacaagcttgagtcctctgggaacagggaatgtcagctgagagaatgctgacagacagacagacagcctgtaagcaagtctgtgagacattatcttgattaatgatgatattggaggacctaacccactgtgagttgtgccacccctgggaaggtggctttggattgtatcaaaaatcaggctgagcaagccatggggagcaaacctgtaagcatcggcctccaggggctctgcatcagtgcctgcctccaggttcctgctttgagaccctgctctgactttcctcaatgctgggctgtgacagagcaaacataagccaaatgaaccctttcctccccaagttgcttgtggtgagagtgttttgtcacataagtatcatgcctgaaataagaggaggcagtgtagactgtatagtggcagacacttctatacaagatcaaatgcagtgttcaacttcacaggagtcttttgtctgctactctctctgtttcctggaaagctgtgtaactttatagactggtaggatttgtctcaaggtgtactgtgtctgctcgtctctaatgaggaagggctctgctgctcctcatggcagacttgaaaatgctccctttactgttcttctcacttttttttttgaagtttttttttttcgtattgttgccaaaatcttatatatgtaaatagcagaggactgtgggagccttgcgcgtaagatttagagttctaattaacccagcagcagcagcagcaaatgcagccggtgcatcctctgtagtaattcatgtaccagtttaggactcagtgtcttctaaagcttaaatgctttgcagcggatggtgatttatataaaccagaccctttgaggtctcatttttctatttcctcttactgcatctaacagggactccactgaggtaaatgcttctttctcctgtgctcatgaactacaaggtcgccccagcacatcagcagggagggatacaatcttgctggctgactcggacacctacttttgccttttcttgggtttatgggtttctcagtaagatgcctccttcctgttgtttggttcccacctgaaggggaagcctgccttacattcaatgtatttactgtattgtaaatagcatgtgaacaaagacagaaaaagggcaatgtgggagagcatcttcttgatacacactgcaatcccagtgctcacgagcctgaggctgaagcaaggtgagtctgacggcagcctgggctgtggggcttcttcctgtggctttgactgagcattgacctctcactacgaggtttggcacttagagaggctacacctgtaaaagagtgaactcaaattagacctgagggctgcagtgaggtgccgggccttagattgttataaccttagatacgtaaagcttacactgtgatttcggagcaccttcccagagttccctagctctaccatgggtatttaaaacctaagtttgtttcatccaataaattatgaaatttggggacttgaagtaagctaatttctgtgattaaatactcattcatttgctagaagattaaatgctatatgcagaatgccaaaggacatgtttaatatggaatctcagttctaattgcagcaccatcattctgttttgagcattgaggaaggacaatgaactatgtgaataaattttaaagtaaaagattaaacctcattaactttaagacagcttttcttaggttttcttaggagctaatttacagtttatttttcatacacaaataaaatttaaaatggatatagactattgtttgcatgctggtgacacggttccacgttaagtagggtcagtcgtgaccttctgtatcccacgttccaacatgtggcttgttacactggcggtgctcgatcacaacaccaatctccagatgagtagctagctgctgaaagctattgtgtttaagtgtgtgactatgtttgccttgactatgtgtgactacgtttgttacctatttgtatgtaagtgtgtggctgtgtttgctttgataatcaagaggaatacttgtccattccaagcattggatggtgctgatctgggagtccttcccagtgctgttactgtggtcactgcacagcagtgctgtgctagtactgacgtccagctgcccttcaacaaatgggtacttttcagaattttcagagctaggatgctacagttgaagcaagaggtttgtctgacttacaaacactagttaaactactcacagtgcctttttgtttttccatggtgaattattcaaaattatatacactctttacattaaaagcttttatacatagatgaaggagaataaaattattatgaagatctaagagatgggtaaatgaaaacttggcatttaatggatcgctatagtatattagatcaggacatgtgtcccataaaattaacttttagatatgctgtctttttaataatggtatcttcttgaaatgcaatcttgtaggttttgatgaagaaaattagagtgtgccttatcttttactctctcctccagctcagtgtgcaattagatttactacacaagatcggtgtggcatatattaattttatcctcagccaccctgctgaaagtaacacaagaaatgtacgaatgaagtcatagccattagccagaatgacaacagttaacagttgtattttgctttactttcactcttgtctatatatgcttagctgctatgttactgattgagcccatctgagtttacattcattttgtcaaagactgtcaacatacaacccaacacgtaatccgggcagggacataagtcacagcctcacaacactttttaaaactgtctagtcagtatgcatgttcatatagtgagaactaatagtggagtcttaattaaacatataataaggcactcctaggactcttccctacactctgagaaccattaagaaatagaataaaatcactggcaggggagagtcaaacattgccctttaaaccagttctactatggaaccccagtctgaagcacgtgccacagtggcttgcacaggccgctcctgatcccaggagagcaactcagatatgacccagagaatagaaaagatgtgttcccagaggggagcccactctggaaaaagaagctcctcccccaggcagttccttggagcacatcacctaatgaagagatgtatttatatgcttgaaatgggcaggggggcagacagaataattcactccctttgcagaacaggtaataggacattttgcttcacatgaaactacatagaacttaaagacagaggaaaagagtgtaacttactgacaaagatagaggcatgtttgaagagaaatagtccaggcacagttgtattatcagggatatatgcaggggagtgactttgcgtttaaaaaaaaaacagcctaggctgtcagagcatgtgacctggggagtggtccccttatccagagctgccagctatagcacaagtgagtgtttctttgagcagggtttgttgctgttgtgttattgaatgctagcatgctgatctctgagaatatctttgtatatttgcatagttttctctgtaatttatcttggcgaatgatatggagctagaagcattccaattatacattgaactcagtgactaatcgtgagatttcaatagcaaagagcccataattcttggagtgtatcatcattctaaagccatgttgcagagtgggattgctttctccttttccctgatgaaaatgatgtttgttatgacgttgggaaagagagttagctacgaggtagatgtcagcattgcatttgtggtgtacgtcggtgcaggcagactgaggggcgtgttttgatgatgcagggcacagctcaggcacattcccaaggcaagacctactgatgttaaggcactgcttccgcttaaatgagggctgcgttgcatttgctcaagatggagccctttgacaaggaacttcagagagagaacggtgagtcatgacataacctacagactttgtcatccctcccaagtgaatcatacccaaagatgtcaccaaaagcaacaaaacaaaggcagtctgcaatactgtgagactgtaagataagtccatccggtataaagcaataggtaactctttgctgaatgcttcagtatgggctactgtgtctgatagtgacgcgtggggtgataagaaagttgtgagcaaacaaaatatgtcagccaccagctgaaaatctcactgggaagctgtgaccagaagtcacatggtatgtggtaaatacaagatacttaatgaatagggccaggttatctattctagacttgcattgcctggtttatttagaaggtttcatgcagaattctatatcatgggatcctgagagatgtgactgtcttggtttagccagagatcattagacttgctgtctatagaaatgacagggtcgctgggtagtggtggcgcacacctttagtcccagcactcgggaggcagaggcaggtggatttctgagttcgaggccagcctggtctacagagtgagttccaggacagccagggctacacagagaaaccctgtctcgaaaaaccaaaccaaaacaaaacaaaaaaaggaagacagggagactgtctaggttgtaggggttcccttcttggctctcttgaacaaaatgggttttttagttctttactagatctcagcgggctgactccagggtctctacaatgacagagaacgaagaaagaatagggctattgtaaaccaaggaaatgagtgttgtctactttctctgttctacctgggcagggtgagtaagcctgacatatcagcttttctttaggatgctacaagcatgacaaataatgtttatggtattttgggtttctactatgagcagtctattttctttgcccatgtccatatgtgcttatgaaaaacattgttttaacaacagttttgtgaactggggagaacttaataaaccacttgtgctggatggttttatgtcaacttgacacaagctaaagtcatctgagaggagggaacatcgatgaagaaaatgcctccataaggtcaggttggagccatgcctgtatggcattttcttatctagtgactaagaggggaagaccaccccattgtgggtagtgccatctctggactggtactataagaaagcaagctgagcaagccataaggagaaagtcagttctctgcatcagctcctgtctccaggttcctgccctgtttgagtttctgtccagacctcctttgatgatgagcagtgacacagaagtgtgagtcagattaatccttccctcctcaagtagcttttggtcatggtgtttcatcacctcagtagaaacacaccaagacacctttctttcttaattaaaaatagattctcttatcatacactatatcctgagtatacttccctcctttattcctctcagttcctcccctcccttccagatcccctccatttgtttctctccttagagaagaacagacttctaagagataacaaccaaacatgaaaaaataaaataataagattaagcaaagactttcatactgaagttggacacaacaacccaagaggaagaagggtcccaagagtaggccatagagtaagagatccactcattctcatagttaggagtcccataaaaatgctaagctaatagctatactacatacacaatggacctggagcagacacagtggacctggagcagacccatgcttgctgcttcagtctctgtgagctcttatacacctggctcagtcggttcagggagccaggttcccctggtgtcagctgtcagtgtagctgagtcatgcaccatctcagtcagttttagagcattctcaggaacagaaaagtagccttcactgccctgccatccacacccacaagcaagtatcccctcccccccccccccgcctttagcaccctttgattactttctgtctcagtagaacaagcgaggcagccccttctgagcacctcgtgtctgatggttcacatggcgtgctgaatctcatagtaaagtctgaagtttccctatgtggctggctaaaacatcataaaccacaaagtcagtgtgtaggaaaggacttttcagccagcaccagttctatgccccagtcatttgtaccacctctttgcatgaagtgcttttaacataatgaaatctgcaataaatggcttatagattttatatttttaatcccctggggacatgctgtgtataaaatttgaaagagtaactcccccttctgagaggttacagcacaatagggtagggatgtgtgtgcataatcaagtggagcatagaataacttcagaatgctcttacagcacggtgcctagaaaggcatagtgacttaaatctgagactgtgggcagcactacagaaacagctcccacacagagtaacaccagagaccaccgaagcattaggagggcttgaagaaggggagaagggccagagtgctcacgcgtatgaccataggacacatcataggccttgggatgtgagcagatgccatagccaagggatggtgggacaggaaggtactaaggggaatcctttggactaaatcaggatctagaaatttctgtgtagggtaccaagagtccaggctttatataccacgttcctttcttggattgctatggcaaagaaccaaaaagcctggtggtctagaacaatacctaccttcccatagctctggaggccacagtctgcagtcaaggtgctacacagccgtggccctcctgtaacctctaggggaggaatctttcttcgtcctgcaaatgcttatagcctcggatacttcttagtttctggcagcagaattctgtatgtgctcttatcatcacgtaacggtctcccacatctcttccaccatctcccctctgtgcacactgctctcttgaccttctttccttctgcctgtccatcatcacatccttttctatacatatacccccactatgctcgataaaaatcttccagcctgaaaatagaaagttaaagggacctcacagaagaaaaggacatccagatcagagaagcggctccaaataaagaagagaggcatttcgccaaagtcatcatgggaaacataccatacctgcttattatgaaaagcgtgagccaggtactgttggcagcgtgagctgttacatgcctaccgcttgacagttggtaaaaaacactttacgtgctcgcttggaaacagtttgggaaatgatgtgggccactccctggaggcttgtgtgaaggctgcatccacaaaacagccctgctcagacgggctttgggggagtgattggaccacagggctctctggcttcatcaatagcctgtctgtggattcatagcttgatggctgtagtggctattcctggttgtcaacttgactatatttggaatgaactacaatccagaattggaaggctcaccagtgacccttatctggaggcttggagatccttatctggatcttggtatggagatcttgagccatagtggctatggattccagaagattgaatctccgagtttaaggaacacacctttaatctgggctacaccttctgctggagacagtataaggacattggaagaagggagtctagctcttgctcttgctccttcgcctgcttgctgtgtgagactgagtaactgctagatccttggacttccattcacagctgcgactgaacaattgttgggaattgggctgccgactgtaaatcatcaataaattcctttactatctagagactatccataagttctgtgactctagagaaccctgactaatacaatggcattattacgaggtattgaagcataggagttgaggccaaccttgaggaagtaggctgtggggaatgtaccctagatagatgctttgtccttggccccatgctgactagctctctctgctcagcctcctcttccatactctctcactgccatgaagttctgcctcacctcagaccagagggatggagcctgctagccatggacatctgaaaccagacacaaaatctgcctttcctactttcagttgttcctcttgggtgttggtcacagacaactgacaaacgcacactttatctgcatgtgggcttcacaccaacccattggaggaataatactctgtctccttaggaaaggaaagcaacgcccaggactcagagcctgcaatgccttcgctgccatcctgacgcctgtgtggactcagatgaacatccttggtaccacacaaacttttgcctagcttatagctttcatattaaccccaaaatgttctgtcagctgtcttacctctgaatcacagaacttagctagtgttctcacgtatgttactgatctaccgagatgatggccatttgtttaacaagctgataaatgatagggatggaatatgtccattgagtaggcaccagcatatgcttataaattattatttattttcaggagtagtaattcttttttcattcatgatgctaaatttggtggatattgtcataaacaacagagaaagttccaaagaaataaagtttggttcttagccagaattcaagaaattttctggtgctaatctgaaatgttagtacctggactagaaatattgtccatacttcctaaagaatagttggtgacagctgggaaggtggctggctgggtgaaacaggagggtctgaatttggatcctcagcacccatggtaagagctgggcagtagcactggagacaggatggagagaggagacaggaagagcctgagattgctggctagcaaggctagcctctctgtgagctccaggtccaaggagaacttgtctcaaaaattagggtagaatgcacagaaaaggagcaccctctggcctctcacgctgtaaggaggaaggtggtgcccatcaccctctggcctctcaccatcacatacatgggtacacactggcacatatgatcacatagattcacttgaccacataccatgcacacatacacaaacacacaaatagccattgtttttctaattattgcctacccatagtggcatcacccctttcaaacaacataaaaggcctgatgaaaatggcacctcaagtcctcagcgctctgggtctgagagccattttgctacaatgtacctttctgtagtggttttatttagtttttcttacttttgctgcttcttaactacaacagttgccatagtaacacctgttgaccaaaggaaaactgaatgccatttgcagaagaaaaatgctgctgtgttcttgctttttactcataccaagggatgctttcattcctttcaaatcctgtgtgacacctttctacatgttggcaggtggttggacccccactatttacattttacatgctaaactgcagctatgtcatcctctagagtccaaacaatttcaaagcttttataaaaagtgtaattttgttagtttttttttctttctgtaaatgacctgttcaggtctttagtccacttacttattgggctaattttttttaaaaagaataaatccaatttatttcccattaacagtttatagaggtaaaagtaacatactatttacttccctttttcggtgactagaatcaactagatttcagtatctgtatgtccctctcacattattacgattagtggacagtctgtccactggacagtgaagaatagttagtggaaagagaagtggtaggaaccgagactccatttccacacgagactgggcagatgagggcagctccaaagcatgttgtcctaatagggtatagggaacgaggatttttaaatagttgtcatattcccagtgtatttgaaagtaatacatatgtatcagagaaatggagtaatactctttgtctgaggccaaaatggacttcctaaatgtcctgtaagagcatattgctcgcagccgtcagcagccatgtctttggatcactttttgaatcaaattctctacagcacttttttaaatttttttattttttgtgtgtgtgttttttttttttttttgagactaggtttcactatatagccctgacagtcctggaattcactatataggctaaggcatcctcaaactcacagagatccacctgtctctgcctcctgattgctgggattaaaggtgtgtgccactatgccaagctacaacctgtttttaatgtcccccttctttatttcctctgtcccttttcatttcccctcttgcatggccaattgggtggatgaagactccatagttgatggaatagctaagcaaagaactgtacatggtagcacaatttcatttgtcttttaaaatatcaccaaaaaagtaaggaaataaagctaggcttatatatgatggtcattatccctacagatatatcagaagaaataggttttagatgttaattttacaatatattaaaggggcgacacatcattagtgccatcctcctgaagtaagccatcttggaaccacaccccattgaagttggcatttgggcccagctggtctggatgcagcattttagcagactttgggtgagggtttcatgtgactacagaacaagtcctcatcaccaccagaggtcataaaacgtggagatctgatcctagagcattgtatgctcctagctgggcctcggtttccttattgcatttccttattccatccagaattgagctgagtttgctctcagctccaagattatctaaagcgtactctgaaatgggcacagtcttgaagactagaacacaaataccatcacaccctgaagatgaagaaaatgtcagaaacccaggtagccactaaagcatggaccctatgtgacttttctgaaaggagacagaacatgaactaacagaaaggaagcaaagaaaggaagtgagcactcacctaccacatgttcagtcctggtgccaaagcgaacggtgagccaatgtggccatcttaataccgtgtcttctagtgaagcaaaagcaattctcaaagattccagccagcctttcacaactaccgcatagttacaattatggagttttctctttcattctgctaaggtggttagttagtcctgcaagctattcctgaaaattatatttttaaaaaaatgcaagctctagggattggaaagatggttcagcagttaagaatactggctgctcttccagagaacccaggttcaattcccaacactgacatggcagctaacaacaggctgtaactcctgtaccagaggatccaacacccccatacagacatacatggaggccaaacaccaatgcacagaaaataaaaagaaatcttatttttaaaaaagtgcaagctctgtctttgaaatggtgcagtgaccagtgtgagcctgcctgtaacgcctgtgttcctttgaatttctgtaagaaacagcagtggctaggctgctctgtccacactgcccgtggctagagctgagtgccctgagcaccgcctgtcttaccctcctctttgcctcggaggcaggatgaggtagtaggagatgtagctgcttttcccatgcgctgattctgatggtttcccagggctgccataacaaagtggcaccgattgtgtagcttgaatggcagcaatagctgtgtcacctctcgttgctggcgctaaggtccagggtccaggagtcagcaaggcatgctgctgcagtggctccaagaaatggtgtcaggcctcacccttgatttaaggcaacaaaacctcagtgctgggattgggttcttccagggtatgtgcatgtgtgtgtgtgtgcgtgtgtgtgtgtacactcagcttatacagttcagcaacgcgagcgttccaccctgcagagatgcaacttcctctttagttcttctaaacatatcatgtcatgacacaaccaatatggtcagagctctctctgtttactgcatggttctattgggtgctggggcacatgttaggtcatgctctgtttaccttcggatgaatttccttttcttcctcagagatagccaagttcaacttaggtcatcttagtgttctgtggaagaaagagagaatgtgtgtgtgtgtgcgtgcgtgtgggagagagacagagagacagagacagagacagatagagagagacagagacagggacagaggtggtggtggttgttgttaaacaatgtatcctaagaagtcttgggtttccacaggtgccttctgtgggcctaacagactgggactgtggggttttatgagagtaactgaacttaagcagtttgagatagataggtcctgtagccagttcatggattagtttgtaaacaactagcggttaacaggtaactaacttatcaattaagctataacttaactggctgtgctgagcggtccctatgcttacgtctacagaatcagtgtctgatgagatcagcactcaaggttcccagaacctccaggaagctgttcccactcgaaattgggctgttgctttattttgccagaaaaacaaacaaacaaacaaacaaacaaacactcaatttgaggattgacctggggctgttatcacggtctatcgaagatggcctttctgtaatatgcccatcacagtgagacagtcaggccaaagctagagaggcctgtaaatggcagcagaatcctccgtgcagagagctgtatctataatgtgtgaagtgggaggcactgagcagtgagggatttttgtatttgtaagaaatgtaataacattgacagatggtagaagtggatgagtgacagtgagtttgccgttgctgctgttctgattgcatgtgtgtttgcagtatctaacagagtagccttttaagttggggtcaccggtgaagcctcacaatgtagcccaactggccttgaactctatcctcctgcctcagcctcctgtaaactggtatgcaccatcatgctcaccttgaaaatgttcttaaataccttttttgcttccaaaggaccagcttttacaaactggtcatgcgcagagtcattttatgtattgcctgttctctgaagcagcgcataagctctgaaagcaggctgtcatgtctagaccgctcgtcgtctgtcccggtgccctgggtgtgctgtggaatgtcctaactgctcactttccgtggactatgggacagctcacgtgttataacctgggctgtccttccgagccgcgaagcctgtcttcctgttgtgcacactgtcactccattacttctcttccagtattgaaactgttcatccacaagccctgtctgcgatccatgcttattcagagggttcgtattcattgtaacattgtaacattgtaagcctctctgcaagtgacgtgcttataaacagaaagcttttgctcataaaattccaattgtttctcactcgacattgctattagattgttagctgtcctccctaggttctggaaactgtagatggtatgagaatatgtacttaagaactccctaaaattcgtaacagcatatcattcttggagagatttatttttaagccaggtcctttattgggatttccagagggaggtactttgctagtgttatctttataatctttttgataattaaaaaaagaaaaaatctgacatccctaaggcatgtccagtcatggcagcctctgcactgcctctttcagccatcctttctcgcctcttccatttcttcatttgcagcaaggaaaataaaccataggaaccctgctcttgatggcctgccactctgcatacctcacggatctcagctgttggagtgcaggaacaatgaccccgacatcagctgatggagtgagagtaactgccagggacacggagctggtggctcagggctgggggaggggagagaaacgtgggagaagctggtgagaggtgagacccagaacaggaagagcttagtgagggagatgccagcaggctacaaggagagtcctgggacacaggagcagggcactagtgtctccacactgcagtccttggcagcccgttactttatctgtagctgatgctgtactgctgagccactgaacacagctagggttgattgctgagaagaactgaatgttctaatttaatggacagaagtatctattctgggtgggggatccctgttttattgttaatttgttaaacccatcactaaatgctagtgaactaatgagaagtattatgcaatagtttatgaccttttttttttaaccaaaaatctatcaaattgctgacatttatcattttgacaaattggggatgtgtataattaactggattaatggctgacttagtaggcatatctcaggggagctgactattaaattgctatcttcttggcaaaaggctcttggggttttatcctaatccttagtcaacactaggcctcatctgggtgaaacaccataaggaaagatggctacataacaaatggcagacagagcaggaatggggagcaccctgacctttaactgagtaccccaaggcagaactgtcacggaaactgtgtaagcagtataataatgcaaatggctcaggaaagagagctggggcttagtccaggcctactggaaggaaacgcacacttcgtttcagctacaagctgatatggcaggatactgggactgattaaaatgctgctgtgactgataaaaagctttctgtataaaggatggtatgcaagacaacacaagtcagggtctgcaccacctttggccagccacatgcagtggagaactgcctttgaactacccaagggggggccacaggggtggggggcagaaaactcaactgtcacctcaggaagtctcctcttgtcttcctaactcaccactttttctcacatacatcctcttgccttccccgaaactggatcggttgtaaccaaagcaaatgtgccccactaacacccacctgttcccatcgacagcggaggtttgctcagtactggtggaatttgattgttcaattgtagtctcccaggctgagatgctactgtctgggcctgaccattgggatgacttcctgcagagccaggcagatctcacaccacaggtgccactcccactgctctgagtggctttagatggagcaagctttcaggtgagttttaggcatatcataagctctttcttatttggaccttcctgggagcatcactcaccaatgttcagaacttattgccagtcccgaggaaaccttcagtaaagcaggtgcctcgtgttccactggctcagtagtcacagacgcagaaggatggatagacagctcgtttcaggagccccaaagtcccacaggatagaaggagatattaagttgaaaggtttggattagtttaagtcagtcttcgtttgcagtgtacacatgtacagatagtcacacagagaaaggagccccaaagaacgactaagacctcacgtgaggattctgctgaggacagatcatgacaatgttctgtcctgaagcccagtgttctagtgatgtagctagagttacactggggtttgccacctttttttgagagtgatttggaaaatagtagaatatctgcatcttttggaatattcttttttctttagtaagagctttactgagctatcatttgcttgacatacaatccatccacttaaatgatgcagttggtgggcttaccatagagcgggacacacatgcttcatagaccacttccatcacccttcaccacagtttctacctcccatcttccccagctctcagcagtcactccttctctatgcagccagctttctttatttgaccatttgtggacgtttcttgtgaatgggatcccctaatatatagagtcaccggcttctttccattaccgtgtgttcaaagtacatccatgttgaccctgtgtcaatgacatcccactctgggtgtgactaatatactctgtatgcgtttgacagtttagtttctgttcaccagttgatggacgcctaggttatttctgggttttagctatttaaatcatggttctatgaacctctgtgcttctggggagtttctgtggtcgcttctctttgtatatatttaggagtagatagtgacagttctgtggttagcacttcctgagaacatctagactatttgcaaagtggatggtcgtcttgcactcttagcagagggtctgcgcgtttggacttcttcccttcccgccagcacacattactgttttagctggaggatatgaagcagcatctcacggtggttgacacttgcacttctttgatgatggcattggccacatgtggacttactggctagtttataagttcctttggagagatgcctattcagactctttgctcctttggggtttggatatcttactgtgttttaagaggtgtttatatattcaggctacaacttctttatcaggtggtttgcacctatttctcttctttgggatgtcatctttaatatgtatagtgttctctaaaactcacgtctttttatgttatattttattgattgtgtacttggcatcatatcagtagcttctttggccagatctgagctcatggagacttaccgtttccctttttagtagtttctgtggtttcatctcttatgtttcaacttaactttagtatggtgtgagttcagggttcactctctccttttgtatgtgactactacatatccagccctgtttcctaacgtgactattctttctccattgaattatattcacacttctgttaaaaggcaattgacagtgtaaataaagggatataaacatatgggtttgctagcgtggatagtaagttttgcccgatttaatcagtatgtctgtctacatttgcaatagcagcactgtctcaatcaccgctgcccctggacgactcttccctcctgcccaagctgttctgacagggcagttatacactgctcctactgctcagctttaagtcgggctctttactcatcaggagtagaagaaaatggaggttgattttatttgactgtatgtgtgatacgaggactaaacttagaccctgagcatgtcatacatgtgttctaccacaaactgtggccccagccctgaaatactttttctaatacgtaatgagagaattttacattaaaacaaacaatgcaaagccattggccttgggtgactaaacctagctcatctttctgactaattcaagagtcttctgaacttgggcattgacagagaagccaagaggtttgtgattagaacttccatgtaaatagaagtgaatgtgagagcctgggaggaggcctgacttgaaagggagtgaaagctggaacaaaggaagtcacttacccaggaagcctggccctcccactttgtgtgattgacacagaagacctggagttgggttagaggaagataacccatgactgtgtgcctcctgatatttttagatttgtttttaaaataagaaaataacaatgtagctgcatggattgcaagcaaaggcagcctttctctcacgacaactggcagggaaagaatagttgtatcttaatatgatgtcatgtctgattctgcaccagaagaaagaaacactcagaaactatgatatccaaagagcaaccataaatatgcatctaggtggcccatgttctgctcacaattgaacgttaaaaaacaaaacataatagaatttgtacctcagtctgctaaaataattgagaagtcctggtcttagtcagcagctataattcactattcatattcactagaatatgaataaactcatcgctcactccattcctcttcccccatcaccgcctccatcatggtgtaagtccacctgcctctgcctcccaggtgctgggattaaatgccaccaccacccggagaggcagggtctcactaagagtgcttgttgctcttctagaggactgagtctggtgcctcaaacttcctgtaacttcagctccagaggctctgagacggctcccagcctccactggcacccacacagatgacctgtggacgcacatgcacacacgcactcacacacatataaatcatttttaagtacactaaatattcagtatagatgacatttgttgtagaatgtaaactggggtggagaggaatcatgcaagatgggagaagggttgggccagtggccggatgtgggagctgatgagtcggcaatgaggggcttgccttcctacagttgcctctctcatttccacagtggggtgaagatggaacgagcacaggctatatccgcatgcccgtggctcctgacagtcacacagcctcctttctatgggaaagagtcaactgagtcatggcttaccacgccaaaagcaggaatgttcttttcatataaattctgagtttttatctcaaatgtaggtagcacttacttgattttaattgtaatatggtaatttacagatttatctgtcacaaactagaaagactttgaggaaaaaaaagtcaattgctttatatttgatccaatgataacatggctgttacttcagggggaaaagccttgtatgttttgagtaccgccagcactttcactggtttagaagttaaaactacggcctctttgaagaggaatgtggagctcagggtctgatccgcaggccagcgttttctacagcaagctggcaggcgtctttcacagcctgtccacatgccttccctgccccccagacattctttctttctttttggttacaggccaagaaggaagagagaaccccagcatactgacacgtgaacgaaaccctcttctggacaaccgtttctccaaggtaattgtggccgtcataggaagaagggagggaacacatgccttgcagtttcagacgacagtgggagcatggagagttgatggtctgtctgctgcagactagggctgagtgaaagggggagagagaagaaagggaggctggtgcttccgtctgcagcctcactaaaagtatcagcagaagaagaccatcccgccctgggaggtcatgggactgggcagcaagtgtgtgggaaaagagggagcggggagagtcctagtgtttagactgaaaattgcattcattcctttatgatgaaatagtggagggattctaactagaggtcaaataaagtatccattctgtatgtgtcatgcaggtgatcctggaccaatgctttgtaccaactaagacttaacaaataagaaaagaatttaagaaatctctgcgtgggggggggggtccctgaaaatgcacaccaagttagcctttcagtggttcatacaaaatgctttataaatgtctcattttagaagataatgtccttaataccacttctaaagaggagctgagggggagacacaggcagacctcagatcctagtggagtgggccaccctcaccttgcacatccacaggaatagctccaggctctccctttgtgaatcatattcttagtaggcaccaaggcttacaggcagcagtagagcccattgtcagcttcagcactcgtgactcgcctcctaggccctgaacacaaactgctctatcatttctatgaaattcctcttttgctgtttagtttttagcatagggctattttcactaggctgagatttttatctgataaagcgcttcctttttccttacaaagtgtctgtgtactcacatccgcagggatgaaacaatacacaactagatttgaaatcttcttgtctgctttctctgattagaagatcatatatggctggcattattccacccttggtgttgtggaaagcagtttcagatggaaggggagagccagcttctggcctccccctccctggcagttctcagaagggttgggggaagtgtaggctgtaagttggaagagaattttgtgatactattcattctcggctctgacagagaggacattgtttgctcactgtaatagtcttggcagggatctctgctgtgcatacagaatgcgagcagagcagtgggaaccgctgaattctaagaaacacatcagcttggggattttttttaaatacattttaatagcttctcattaccaagatgcaagttataatttaggaaaacattttccttggttcctttcttcacactgcattatgcatgtattacataaaaggtccttatgagagtagggtgcccatctaagctgtggcatcaagcatttcaatcctagaaattcagaaagacatcctgcgcgctgcagacagcctcgaggcttgctccttgtacatcagcactcctatcagtgccagcagtgttagcttggagctcctgggaacaattatgtgcagacagtaatcagtgtatggcagggacacggtgagagtaccacccgcggtgtgacacacagagaacgtgcataacttttaaagaccccaacttcagaaggagtttctgcaatctggattgtgtgaaaggaggacaggagctagagctcagcggcagcaatgtgcctggtgtgctgagagtctgcattgcatcctgactattacaaaccacggtaataatgatggtgatgggtgagcataggcaggacatagaggagtacattgatatgacagtgtttgggactgaataacagataccaataaaaataactaagctcttcaaccttctccacctcctttttttattccaatggatgcattttagataacctgtttttaatataaaatttttatataaatatacaggattgctgagggtgtggggtagaatatggcattgtatggaggcatacgagagacgcagggccagccactcctgcctgtgtctggcggtctgtggaggtgttgcttgtgtggcaaggataccttcagaggacctgctggcctatcattgtttctcttgaggctcctagaaccactgagactccaggcctgagcagtgtcactgtccttggctcctggcttttcacacctgtgagcacagctcatcataaaagggacagggataggaaggagctcacaggcagctagatccttttagctgcagctgacctgaagggaagagaagaagggtgttgtgtgaacattggggcaaggcatccttacccactgtgaagagaaatggttatgacagaaaccaccccaaaggctgcatggtgttttcttgtttgacagataatttatggctcctgggaagggcgggataatctgcatagctaccctggtgtgatggtgaggatgcccatttaactggggattcagcagttcagagtccataaggacctgagaggcaagagcagagtcagcgctggcgtccagcagctgtgggatctggcttagtgtgtgtgtaactgaccatcatcggggcccctggaccggaccagagcccgctgagcgggatctgtgaacaacctgtaaacagtcacctccacggaggcgtacaccgtatggtccatcatcgtgtttggaagcatggcctttgtctgattgtgcttacgtctgtagaaaaataatttatagtcttcttctgtctacagtgggcacatgatcattaaaaaacaaaattccaacatttccgtcacgaccctcatggtacactgtaccacaggtgactgcacaggattcccaacaggcccagtgccctcactgggagactgggctccttactacattgtgacttaccaccttcaagagcaccgcagctgacactgatgtgtcagccgataacatgtggccatttccgttcctcacctgattcctggggtctcatcttaacccagaccctcccaaggtgtgttcaaaggagtcttttttttctccttaaaatgttttattatttgaattttctattgtatattaaatatcctaatcatattaagtattttaagaattgaataatgcatcaagatatttcattcaacttttcatattctttagtaccctaaaaatatcgttaaatcatattgaataatgcccatactctggatcctacttctaatgcttgatactaaattatgtttcagaacatttaaaataacctttggaaattaaacatagtagaagaacataaaatgttagagaatcattaagtaatatattaaaaaccattatacaataccacctaacatagagtgagagtattcaaaatgtgttatatgtctgtataaattgtctaatagcttactttaaaagattatccatgtttctatgagagaatttatgtaatcagtaagaaaattttaaaaatatcaaaataggaaaaaccctttgaaatcaaatattacaaaaatgttcattttgttattattaatgtccagccttagtaaaaagagcaaacatgggctggtcagtggtcaccagaacaaatttagcacaggactgccctgtgtgacctctgcgagaggatgcccataaccctgtagagacttgatagtccagagaggagggatgccgggggcgggaaggaggtgtagagtctgtagagatgcgggtggggatgagacagtgagagtatgggagagcacactctcagaggacaaatagggggggtatgcggtgagggactctggggtgggggaccagaaaggcgacaatatttggattgtaaataaataaaataattaattattttaaatgctaattcatacacaataagaaaatctttcaataattatatttccatgatgtttgtagactgtttataatattttcaagtgttaatgtttctcaaacacaataataattttgagataccttttcattaaattgatgtatccatttcaaagtataaaaaataatacaatattccatataatcagagtattatacttttggctcctttacacatcaatttaatgttaccttttagtgtgagtgttgctgtgtcattttactaaaacagccatcagatttctcttaaaacctcagtcttcctaattctttaccagacttaaattgatgtctgagcactgagatgttttcttttttttttccttttccttttaattggatattttatttatttacatttcaaatattataccctttcccagtttctgctccagaaaccccctatcccatcccccttcccctgcttctataagggtgttctgcccacatactcccagctcccggccctgccattcccctatactgggcatggagccttcacaggaccaatggcctctcttcccactgatgtcccacaaggccatcctctgagacatatgtgtagctggagccatgggtccctccgtgtgtactcgttggttggtggtttaggccctgggagctttgtggggatctggttgttgctattgttcttcctaggatattgctatgaagcaatcccttcagctccttcagtcctttctctaactcctcgattggggaccccatgctcagtacagtggttggctgctagtttcctcctgtatttgtcaggctctggcagagcctctcaggagacagctatatcaggctcctgtcagcaagctcttgttggaatccacaatagtgtctgggtttggtgactgtatatgggatggatccccaggtggggcagtctctggatggcctttccttcagtctctgcttcacactttgtatttcctcccttgagtattttgttcccctttctaaaaaggacagaaacattcactttttggtcttccttcttcttgagcttcatgtggtctgtgaattgtatcctgggtattcagaacttttgggctaaaatccacttatcagtgagtgcatatctgtgtgttcttttgtgtctaggttacttcactcaagatggtattttctaattctgtccatttgtctcagaatttcataaattcattgtttttaatatctgagtagtactccactgtgtaaatgtaccacattttctgtatccattcctctgttgagggacatcttggttgtttctagcttctggctattataaataataataaataataggctgctatgaacatagtagagcatgtgtccttattatatgttggagcaccttttgggtatatacccaggaatgttatagctgggtcctcaggtagtactatgtccagttttttgaagaaccgccaatctgatttccaaagtggttgtaaaagcttgtgatcccaccaacaatggaggagtgttcctctttctccacatccttaccagcatctactgtcacctgacttttttatctttgctattctgactagtttgaagtggaatctcagggttgttttgatttgcatttccctgatgactaagactattgaacatttcttaggtgcttctcagctgtttaatattcctgttgagaattctctgtttagctctgtaccccatttttaaatagagttatttggttctctgaagtccagcttgagttttttgtgtagattggatattagccctcttatcagatgtaggattggcaaagatctttcccaatctgttggttactgttttgtcctgttgacaatgtcctttgccttacagaagctttgcaattttatgaggtcccatttgtcgattgattcttgatcttacagcaaaaggcattggtattctattcaggaaattttcccctgtgcgcatatgttcgaggctcttccctactttcttttctattagattcagtatatctatttttttatggaggtccctgatccacttagacttgagctttgtacaaggagataagaatggatcattgctgactgacagttgagccagcaccatttgttgaaaatactgactttttcccacagaatggttttagctccttcgtcaaagatcaagtgaccataggtgtgtgggttaatttctgggtcttcaattctattccattgatctacctgtctgttgctgtaccagtaccatgcagtttttaatcacaatatctctgtagtacaacttgaggtcagggatggtgagtcccccaattcttttacagttgagaatagtttttgctatcctggattttttttttttttttgttattccaaatgaatttgcaaattgctttctcaaactctgtgaagaattgagttggaatttttatagggattgcattgaatttgcttttggcaggatgaccatttttactatattaatcctgccaatccaagagcataggagatctttccatcatctgagatcttcaatttctgtcttcagagacttaaagttcttgtcatacagatctttcacatgcttggttagaatcacaccaaggtattttatattatttatgactattgtaaaggatgtcatttccctaatttctttctcagcctgtttatcctttgagtagagcaaggccactgatttgtttgagttaattttatatccagccactttgctgaagttgtttatcaggtttaggagttccctggtggagtatttggggtcaattcagtatactatcatatcatctacaaatagtgatattttgacttcttcctttccaatttgtatccccttgatctccttttgttgtttaattgctctggctaggacttcaagtactatattgaataggtagggagagagtgggcagtcttgtctagtccctgattttagtgggattgcttcaagtttctctccatttagtttgatgttggctactagtctgctgtatattgtttttactgtgtttagggatgggccttgaattactgatctctctgatgcttttatcatgaaggggtgatgaattttgtcaaatgctttctcagcatctaatgaaatgatcatgtgatattttctttgagtttatttatatagtggattacattgatggatttccgtatattgaaccatccctgcatccctgagatgatgcctacttgatcatgatgggtagtcgttttgatgtgttcttggattcggtttgctagaattttattgagtatttttacattgatattcacaaatgaaattgttctgaagttctctttctttgttgggtctttgtgtgacttaggtatgagtgtaattgtggcttcatacaacaaactgggtagtgttccttctgttcctattttgtgaaatagtttgaagaatattggtattaagtcttttttgaaggtctgatagaattctgcactaaacccatctggtcctggacattttttggttgggagatttttttttaatattttttattacatattttcctcagttacatttccaatgnnnnnnnnnnnnnnnnnnnncctacccacccattcccatttttttggccctggcgttcccctgtactggggcatatacagtttgcgtgtccaatgggcttctctttccagtgatgaccgactaggccatcttttgatacatatgcagctagagtcaagagctccggggtactggttagttcatattgttgttccacctatagggttgcagatggttgggagatttttaataactgcttctatttctttaggagatatgggactgtttagatggtttatctgatgctgatttaactttggttcctggtatctatctagaaaattgtccatttcatccagactttccagttttgttgaatataggcttttgtagtaggagctaatgattttttttaaatttcctcagttcctattgttatatctcccttttcacttttgattttattaatttggatactgtctctgtgtcctctagttagtctggctaagggtttatctatgcttttctcgaagaaccagctcctagttttgttgattctttgtatgattctttttgcttgtacttgggtgatttcagccctgagtttgattatttcctgctgtctgttcctcttgggtatattcagttcttattgttctagagtgttcagatgtgctatcaatttactgtgctctctccagtttctttttggaggcactcagagctatgagttttcctctttagcgttgctttccttgtgtcctatatattggggtatgttgtgccttcattttcattaaattctaaaaagcctttactttctttatttcttccttggcaaagttaccattgagtagtgcattgtttagcttccatgtgtatgcgggctctctgttgtttttgttgttattgaagaccagccttagtctgtggtgatctgataggatgcatgggattatttcaatcatcttgtatctgttgaggcctgttttgtgaccgattttatggtcagttttggagaatgtatgatgaggtgctttaaagaaggtgtattcttttgttttaggataaaatgttctatagatatctgttaaatgcatttggttcataatttctgttagtttcaatgtgtctctgtttagtttctgtttccatgatctgttcattaatgagagtgggggttaaagactcccattattattgtatggggtgtaatgtgtgctttgagctttaataaagtttcatttacgaatgtgggttaccttgcatttggagcatgttcagaattgagagttcatcttggtagatttttcctttgaccagtatgaagtgtccttccttatcttttttgataacttttggttgaaagtcaattttattctatattagaatggatactccagcttgctttttgggaccatttggttagaaaattgttttccagccttttactctgaggtagtctgtctttgtcactaaggtgcatttcctgtatgcagcaaaatgctgggtcctgtttacaaatccagtctgttaatctatgtctttttattggggaattgaattttaagagatattaaggagctgggcgtggtggagcatgcctttaatcctagcacttgggaggcagaggcaggaggatttctgagtacaaggccagccttgtctacacagtgagttccaggacagccagggctacacagagaaaccctgtcttgaaaaaaaaacaaaacaaaacaaacaaacaaacaaaaaacaaaacaaaaaaaacaacaacaaaatattacggaaaagtaattgttacttctgttacttcctgttatttttgttgttagaggtggaattatgtttgtgtgcctatcttcttttgggtttgttgaaagattactttcttgctttttctagggtgtagcttccctccttgtgttggagtttactatctcttgtccttcgtagggctggattgtggaaagatactatgtaaatttggttttgtcatggaatatcttggtttctccaactatgttgagagttttgctgggtatagtagcctgggctgccttttgtgttctcttaggttcggtatggcatatgctcaggaacttctggcttttatagtttctggtgagaagcctggtaggtcttccttcatatgttacttggccttcttcccgtactgctttcaatatactttcctttgttttgtgcatttggtgttttgattattatgtgacagaagtagtttcttttctgctggtccagtctatttggagttctgtaggcttcttacatgttcatgggcatctctttctttaggttaggaaagttttcttctatagttttgttgaagatatttgctggccctttaaatttggaatcctcgctatcttctatacctattatccttaggtttggtcttctcattgtgtcctaggtttcctggatgttttgggttggagctttttgcattttgcaatttttttgactgtcatgtcaatgttttctatggtatcttctgcacctgagattctttcttctatctcttgtattctgttggtgatgttttcatctatgatttctgatctctttcctaggtttctccagggttgtgtccctttgtgatttctttattgtttctatttccagttttaggtcctggatggttttcttcaattctttcacctgtttggtagtgttttcctttaactctttaagggatttttgtgtttcctctttaagggcttctagccgtttacctgtattttcctgtatttccttctagtgtgtgtgtgtgtgtgtgtgtgtgtgtgcgtgcgtgccaaaaactttttgccagtttactttgtcttattattaaccacaaaaagaattgtaagtttagtgttttcacccaaacttaagatatcacaatgttagttattattatcatgtatctgtcttagtaccatgctatatcaaatatagcttttaaattacataattagttcccaaaccaggaatatattgcataattacaatttcaaaaatggatggtgggttggagagatggcttagtggttaagaacacttgtaggtcttgcagagaaagaacaatgcaggtactgggtcttgtccctcatggcggctcaccatcatccataactctaaatccagaaagcccaaagccctcctctgacctcctcaggcaccaggcctgtgtgtaatacacagtcgtatgcacaggcaaagcagtcatacagataaaataaatcttttctaaatattttacagttttggtaaggcatgcatttcattacaaaataaacatagaataaattaaaagtacattactgccaggcggtgggggtgcacacctttaatcccagcacttgggaggcagaggcaggcggatttctgagttctgagttcgaggccggtctggtctacagagtaagttccaggacagccaggactacacagaaaaaccctgtctcaaaaaatccaaaaaaaaaaaaaagtacattactttttaagtagaaaaaccacaaaatataatacctaaagtttatttttaaacaaatttgactgtaattaataaaaatataccaaaaaaaaattttacatgatgtgtcttgtatattataaaccatttaaatatgtgccatgaaggcttataaaactttaaccctgaaagtcaaagtccaggaaagctgtgaaatcatgtttatatctgttggaatcagaatcttgccattctttatttcagatttatttttattttctgtatatgagtgttttgcttgcatgtatatctgcacggcatttgtgtctggttttcagggaggccaaatgagggtgccacatgccctagaactggagttatagttggttccattccccccaactaggtgctgggattgaacctgggtcctctgaaagagcagcaagtgttcttaaccactgagccatctctccagcccgcaaatcacaggcgtgtgcttgtttgttgtttgcaacatcagggattgaacccagggtttcacacaggtgaggcaagtgctcttccactgaactatggtggcccaggtccaatcttgccagtcttataatccataagtacagttactttattactgtacacatatgactgaccacagacaggcaggctcataagcattgtaattgactatgaggcctgatcagttgcagaagaaaccctgaagtctactgggagggtcattgtactagaagagaatgtcctaaagcagggctcacaccactcccccacccatgccaggcctcctggagtttgctggccttggggattaccccttgagatgaatgccagccttaaatgtccctgcctatccctgcctatccctgcctatccctgcatatccctatcctgtttgtgttccctttccgtactgcatgctagagagccacaccattcccaagccatcagtcagaaaccagtgatgttgctccgttgattgttcttttatacaaaaggagatttttcaagaatttctactttctattaaatactgtattttccttcctttgtccccctgggtgttgctgagatcttcttcagcaaacttatcagtttaaaagttctgcctttatccatttcttccatcatagtcgatcaaagtttcatcgactgttccattcaaacatcactaacaacattcagaattatttagaatgaactcagtgttttccaggattggttggctctaatcaatggtttggtttggttttcgttttgttcttttggctgtctctcctcaatgttaatttaaaaacccacctctcctcagagcactgttaacaaagcctttaataaacatctaaagaagtattcattggacaggacagcaccagacaaacccactcagagaagcagctgttgccttgcattaactgaataaacgacagtatctcttggggtcgtcactagctgttattttcagacgttagaagagcaattcgcctgtactagacaaagctgtggatacactgtgcttggtgcccgggacaaccttgttggcctttagagttcccatttacagtgcagcttcaatcagagttaagtgctgggcatctctgtaagggacacaaatgcttgagcattctctgctgtgattaatgattctcctcggagtaacgagaatcagcctcgtttaggagatgtcacatagaccttgagaggaaaatgatcagagaatcgctgtgggctttaaaacaatgaaccaacccagtgatgacaaatcatacaatgctctcatcgttgttggtgaaatgctcgttattcctagcactctgtcctgtcctttgctttttaggattaataaatccatgggggaaaaaatcagagaccatgtgccagacccttccaaatgtcacattcttttgaacttaacctttctcctttgcacagcatatttctcataactaaaacctgagatgatttcattgccatgtgccctctttcttcatactagagaacaggagagcagtaactgtaggagtatgccttctgaatcctggtgtccattcctcccccttccctgttgctggcctcctaagaatgtgtgcctcccattccctggccagtctctctctcctcatcatctctcaaagaaagaaaataaagcacagaaactaaatggaacacagcatcctgggctggatcctggggtgaaaagccagtcatcagaacccttggctgctgactcacacctcccagcatttgtgaggtggaagcagaaagatggcttccagtctaaggccaaccagggctacagaatgatactcttgtcttcagaaaaacaggtaaaggctaagaaaatatgaattaaatgataactgtatagtagaatatagctaacataagatgctaatgatggactagaaaaactagggcagatacattttacatggacatagtaaatgcctgaggttgacttaagcccctctgtaagacgagctgctatagacaacgagcatttctccccttactaaaatcctccactgaacagaatggcagaggtcagcaaaacataggccttcggcaaagtctcaggagcagctccagccctgcagcctgagtttgtgcaatagcgtacatttgcccttgccctccagatgccccagagcaatagcgtacatttgcccttgccctccagatgccccagagcaatagcgtacatttgcccttgccctccagatgccccagagaggtgatataggctcagggactctagggcaggtgcccagacattcggggtgggagcactagctggcatcatctacagctcacatcttgttttcctatctacaaagtcaggtcccaccaggtctttcttttggggaaacctatgatttagagtattatcttaaaagtgcatttgtaaatatagtcacaaaatctatcaaggatgaaatgttggcattaaagtgatttgtatatattatatactctaacaagattatttacaattttggcacttttgaactcttgactgaaaataatcacaattttgaaactaacagtagtgccatgtgagagttacttgcacactaggaaaataagaccatgttctttggcagcccatgttgaatctgaaactaaaattaaaccacactgaaataacaccttgtagcttagtttgtgataaaatgattttattcacacaataatgtaaatttttggaggaagagtttagattaatgctcttaaacgcgttctcacgaccggccaggaagaacacaacaaaccagaatcttctgcggcaaaactttattgcttacatcttcaggagcaggagcgcaagccccaagccccaaaaacgaaaggcccccaaaaacgaaagcgaaaccccgtccctatttaggagagttatccttcgcctaggacgcatcactccctgattggctgcagcccatggccgagttgacgtcatgggaaaggcagagtacatgtagtggaaaaatacccttggcacgtgcgcagattatttgtttaccacttagaacacagctgtcagcgccatcttgtgacggcgaatgtgggggcggctcccaacatctccccctttccttttaataagagcaataggccacccatattaatgagagtggagatagaggtcaaatccccagtgtgcaggtaaaggagtcatgtacaggattagctcttaggctcacaggcttttacccagagcaaccctaacctgctcccgtgtcgttttgcctggagagaaggacacttggacactcaaccttcttgaaagatgacatgtctccctagaataggctcatatatgccgcagagcccttctactgcagtgcttagccgtgtaactctctcgggctgctgaagcacactcactctatcccgtgcaatgagactagcctcgtgggatgcaagagctgagtggccagcgacctattgcctaagcatagatatatcaggggaagcaccatgttctagagctgcaagtgcctgggcaataaccaccttgtctctcttagtttgggccttaagcttacagaccaaccaaagaagcaacactaatccacagcaaagtgtatctccaaataatatcaatcccacccattctttaaagaagggaaatgctgaggagatccaattgggtaatcctttggtcagggacaggtccaagcgcgtggagttgacctgaagtctcaattcccgaaggatctgttcaaatccagccgtccaattctgtaacatatactgaaaaagactttttgacaaattagctgccctagtaaatttctcatactgaatggaagtaacacacaatcccggaaacttttgttcacatcccagctgagctatttgccataatacatctagttgtttctggacaagatctatgagttgattaaccagcatgagaccaccctgtatcttgacattagctgaggcctgtttatctatgactgtagtcactgaggctgacaaagtgttaatggtgtcagtcgtctggacctgtccagacagagccaaggctgtctgaatcaaggccaaacccagttcctagttagtggtaaaaaagcaggggaatacttgagcattatacatcaccgtcattaggagtggaaatgtcgacattatcccccaacgctgctctctttttattattgacgccctggacatcaccaagacgagggacatcagtattcccttggtcagtctggatttttcgggtgagtctttctggtatccaaaatgggttgtcttcattctgtgggaaaacacagatagctcccctggatcttatcaaaataggatccgggccatacaatttattatcaaggacatttttccatttaaccatctcattgggcctatctggctctgaacaatgacgttcagccgcagtatggccatgaacatcaatatttaaaaaaatgagtgtaaagagtgtcatagacacagacactcttggtactcggggtagagtctcctcaattcccctcttctgttttataagataggctttgagggtgcgatgcgcacgctcaacaataccctgtccttgagggttgtatggaagtccagtcaggtgggtcacgtccatttgacggcagaactgctggaatttttgagatgtataagctggtccattatcagtcttaaggagtttgggttttccccaagtactccatgcctcaagacaatgttgaatcacatgtgaggccttttctccggttaacggagaagcaaacatgatgtcagaacatgtgtcaatggacacatggagatattgaagttttccaaaggaagaaacatgtgtaacatccatttgccagacctgtagaggtcgaataccgcgtgggttaattcccacatgaggaactggcaagaactcacagcagctttgacattgagtaacaatgtcacgggcttcttttcttgtcaaggagaaacgactgcgtaatgtttcagccgtcacatgaaaattgttatgaaaatttcttgtagcctctaccggggatgatagggcagcagccaccactttagtggccttatctgccaaatcatttttcagagccatggggccaggtaggcctgaatgggctctaacatgagtaatataaacaggaaatcttctggataacaaaactaattgtatctgctgaaaaatattggcaactctactggaaggcttaatcactccagccacttctaaaagatttactgcattaaccacataacaggaatctgacacaatattaaggggttctaaaaaggtttttaaaacttctaaaaccactaaacattctaccacttgaggtgaattttcattatattgtttggataccactttaccattagccacataggcacctatgccagtttttgatccatcagtatataccacaatcccatttttaagtgggtttcttactgttatttgtggaaacacaacagattgattttgggcaaactgtaaaattggatgttttggataatggttatctatttgtcctgaaaaggaggtaactaaaactgcccaatcattagatgtggctgccaaggtttgaacctgtgcagcggtataaggtacaattaaaagatatggacttcgcccaaagtgggtgattgctgcttttaggcctttaagggcaagctgtgcaattgcatcaggataccaatctattattttagctggggatacgtttggatggatccacaacaatggcccattttgccacaaaactgcggttggcaattgtgctgtcttaaagacacacaaactgaaaggctgcgaatcctcaatacgttgtaattgtgcattctgtaaggctttttctaccttttgtaaggcctggttagcagctagagtaagagccctaggggaggagatatgaggatctccttctaaaataccaaacaaaggccttaactcagcggaaggaatctttaaaaaaggtatgagccaattaatatctcccaacagcttttgaaaatcatttaaggtatggaggtgatctcttattatctataccttttggggcacaatcttatctggggacaccacagagcccaagaattgtcctgtatcagaaatttggactttttttgtggctatctgtaaaccccactgacttaaagttttaagtagaaaaggatatgccttctgtagcatggtaaggtttttatggcacaggaggatgtcatccatgtaaaggagcaaaattaaagaggggaattgttccctcactggcaaaagagcttcttgcacataaagttggcacatagtaggactattggacattccctgtggtaagaccttccattgatacctcttatcaggttccatgtgattaatagaggggatggtaaaggcaaatctgggcctatctcttggacacaaaggtatagaaaagaaacaatctttaatatctataataattaaattccagccacgtggtaaggcggaaagtacagggagacccctctgtactgggccaaataagttcatttgctcattaatggctctgaggtcatggagcagtctccactttcctgactttttcttaattacaaaaattggagtattccaaggtgaggtagagggttcaatatggcctagttttaattgttcctctaccagttgaatcacagcttccagtttttcagaggataggggccattgaggaacccacactggatcccctgttttccatggtatgggtcgtgttgccccaatggccactaaggaaaacccagaccctgtctgtcttggtttccattaggtgagatgggctctatctttccctgttcttgatgtcctaacccttttccttctttataacccatctttgccatgatattttttgctttagctgaataccctcccgatggggcgttttcattggacaaaataaggcccaaatgctgcataatatcccttccccagaggttaaccgggagtgggagcacataaggtatgaacttcccttgctgcccttcagaggattcccacgtcaaggcaatggagcttatagtgggacatgattgataacctaggccctgtaatgaatgagatgactctgtggtgggccatgctttgggccaccaatgtgtagaaattatacttttatctgctccggtatcaaggatgccttcaaactcttttccgttgatcttaaggcggagcttaggtctatcattcaaagatacaaccaaataggcagaatcatttcctgaggagcccattttctttctctcaggtcctgcaaatttctccctggtattatcagggaggagcagcagctgagctatcctatctcctttactaatagaaaaaacgcccttagggcttgagcacaggacctgtatttcaggggaatgttgacaatccataactccagggtggactactaagccctgcaaggtgagtgaaccccggccgagaataaggcccatggttcccgggggcaaggatggtataggctccactggcaccggctgaatactcatttgaggcattaataggaagtcggaggcggcacgcaggtccacccttgtgggtcttcctgggtcgcctctctgactgcttcctgggtcctgacaaaccggttcccatatctttgagggccctgggaccgagggcccgatgacccgttttttggcacataagctgattgactatcaggtggggggaggattctgccctttatatccctcacagagcgacactggtcggctctatgataacccttgccacacttagagcaaagagtgagagtccctccctgtttatctggagctctgcaatctttcttaagatgcccaggctttccgcagttaaaacatgtcctctgatcatttctgcccatggagcggttttgggattgaaggatggcagccgctaaacctgcattgctgagaggtcccccaagctctcgacaaactctgagccagtcttgtaagcctttgttctttcttggggctatggccgcttggcactcctttgtggcttgctcataaatgagctgttctaccagaggtgcggcttgctctgagtctccaaaaatacgctctgctgcctctgtcattctggccacaaaatctgagaaggactcctgaggtccctggacgatctttgttaattgtccagtggcttcacctgctcgggagagcgccttccaggccctaatagccgtggaggaaatttgggcataagctccccaatggtagtttgtttgatcagcagaataagctccctgacccgttaacaagtcaaaagtccaatctctctgctctggagtcaaagcagctgcgtttgttcgggcctgcgcttgtgcagcttcatgccaaagagctctccattccatatatttgcccatactagggagagcggcttttacaatcgtttgccagtcggcaggagttagtgccatgccggcaagcctgtctaactgcaccaaggtaaaattagcattggttccgtatttacggaccgactcggcaagttctttaatctgcacatattctaccggagcgtggacacgcccaccctcggctccttcaaagaccggaaatgcctgttgtattttcctttgttcctctctgggaatgaatgagtctgcgcattgcctctctgcgcattgtctctctgcgcattgtctctctgcgcattgtctctctgcgcagggctgacgcactacgcagggcgggggctccgcatagggcggaccttgaagccgactgcccggaggctgaacagcatgctggccttcgccagccgcttttggcttttttcttgaccgattagctagcactttatctggctggtaatgagctgcttcttcctcccagtctgtttcttcagaggagaattcttcatctgcttcagagctactaagagctggcttcctgagctcatctagtgacgagtatctcttagagacctccgctaattgatcttttttcttttcttttttcttttccttccttctaatctctccccaggtattcttacctgacctaaacttttccttgggttcaagacccttggaaaggcctgtatacttagtttgtgtaccatattttctctttgctcctactctctctccccgctttacttctgatagattgtcctgaatttcatccagaattttcagccctatcttaatcacttgataacatgtgaaaaagaacaaaagggctcctaacactagaaaaagttcaaggccaaacataccttgtaaagctatttcccactttacttctgatagactgtcttgactttccttagaaagttcaagaccagacttaccttgtaaagctgtactcactggtactcctgttccccagctgaagagttctgaattcacgcagttgaatccttctcaacagtctgttttacgggaaccttcgttaccatgacccgcagttctggttccggaatgagggatcttccttgcgccggtgatggttaactcccgtcccgagttttcttgtattttctcgtcccgggtttcagcaccaactcttaaacgcgttctcacgaccggccaggaagaacacaacaaaccagaatcttctgcggcaaaactttattgcttacatcttcaggagcaggagcgcaagccccaagccccaaaaacgaaaggcccccaaaaacgaaagcgaaaccccgtccctatttaggagagttatccttcgcctaggacgcatcactccctgattggctgcagcccatggccgagttgacgtcatgggaaaggcagagtacatgtagtggaaaaatacccttggcacatgcgcagattatttgtttaccacttagaacacagctgtcagcgccatcttgtgacggcgaatgtgggggcggctcccaacaaatgtgcctttagactatacacttaagtgccaactagctgtggtggttatttaatacagtctgtaatgtttatgttggaggctttcaggccattttcaggactcacattatgcttagagttaatcatagggacattcctcatctaggaattactttttagttcctgttaagccagtcattgctagtccaagaaagtatttcctagctgcagcacatcagcactgggttttgattacaagcacattaaaaaggttttgttctaattaccttgaaagttaaatcccataatgactatgagggaggggagctgtctgtgcaaggctgagtactagttcccaattactcctcagtaagatcacccacaggttcttagtgtccctacatgcaagctgtaccccaaaactaattaatccaatctctatgggcacgtgtttctaatgtgcagctgaaattgaagattgctgccttggaaagcaacaggcctcccaggtggctctccatcacaggatgcttctgctggctgtgactggctggcttgagctagggagaaacaggaacaaacagcagcttgtggcttaccccgactctccatccaacaggcatagaccgtgaaaactcttacaggcatgtcaggcatggcttctgggtgatgctggcattgcctcgtcctgcttggcaccttacttccccacataggatcaatagcagctgacagttaaacagcgcctgcatagtaccaggtcccatatgtacaaatgatcttactcgaagccaggaaggatgaattaaaaggccagagttcttggcttttctgtcaggaggacctgaggtcaatccccagagccctcattatagggagaagtctgaagttctgttttgtaagaaaaaaagtcttattgaatattttgttattccatcatttgttcattttcttaataaacaaactcaatcagaagtaaggcttaaaattgccacaaaactacaaatgatctcttataccaaaagtaaaatagtaaccccatctttatctcctccaggcaagcctagggcaaccgcttgtccagctctgtatcctgtggagaggttcgatggcctctctgtgacacaggtcagtgtggcttagctcatcttagctgggctccgctcccatgtctgggcttcagctaggacacactggctgacagagctctgctctgtggttccctcccagggtgttgtagtcttgatgaaaagggcatcaggtttcctcaagaatacaaggtgtctcagactccccagaactgagattttgccatttttgctgtttcttggctaaagcaagtcaaccagtcagtctatattcagatggtggaaaggcagatctcctctcctgataaaagatgctgggatctcacattgtgaagggcaagggtaaaggaaagagtgggcagttgtattccttttaccatcacccagaggacagaaaacagtcaggagagattcctgagacatagctgcatttgagcagatttcaaagatacagaattcatttcagctgctaagaatagcaagaccaagagcaccaaatcacagtctccttagacaaacgacccaggaggtacagctaacctgtcacttagggcaccgcctgaatgctctgggatcaggacagcgaggtgacctaagagcccctgtgcagatgtgaagacctgagagagcttcaccatgtaccagctggtggagcatgtacaagtgacagtgcctttgtttagtacagaaaggtcaataccatatcgctaacttttactgtgtgaccagccaccccacaacttgacagtttgcaaacagccatttccttagcttgcggttccaagtctttcatacggggtaagaatccatttcaaaacttgagctcttgataaaccttatggatttatttcactagtgtaagtattttcatcaaaccacttaagccccacatagtccagattgatccgtaaattgcacacacatcctatgcattgcattgagtggaggtcattcgtctggaggctaaaatgtctaattagtgatgtgggtgaaaaatacctgtttcgaaatgaataaaacatcaaaggttatccaaagtgatcggagggccaggagtgtgtctcagtgggtagagcatttcagagggtcagaggcgtgtctcaatgggtagagcatttgctcttccactgtagtctggattccacagcaccacgtaaatagcatggtgtaactacgtgtacacctgtgaccacagtgctggaggtggggttagagacagatcactgctgtttgctggccttctgtacagccaaactagcaaactcctagtccagtgagaaaccttgcctcaaaagaatgaggcagagagacagaagacctgacattcattatcttctggcctttgcagaggtaggtgctcctacacaggtacatacacaccactctacataccacacatggatgcacactgtagaattatggcaaattcactaagggatccaccttttataacaatggacattttaagcccctaaaacagatgtcatatgtgggatctctgccactgactccagccgagttcacccaagccactacttccagaagtgccaagatgtctggagagcccaagtcttcctcttgtgggcaacactatcaagctctgagcattgagtcccctttggcaatttgtagtggccctgtgacagggtatttaaacaatttagtgtgtacctctccaggccccggggtgactgaagctgtagacctgacctcagctcctccttaggcaacagccccttgtagcatcatccatgcttataactatttcattgcattgatggtaagtatatggtcatcaagtacacaggtagtgagtcccagaaactcaggatatcagaaagaaacggggtttggagttaggtgttcaaagtgacccagcccagagatttactgagggattcaaatctgcctttaaagatgcttgtcccatttgcctctcctgccttttctcagtggaacaggaggcatgcaggtcagtctgccatgccttggtgatattgtcgtctgttctcaacatccagtgtttgtttttaaaacaatgttttatggaccgtggaatgaagcacctcacagtactgctttgtctgctctgcaggcagacagagattctcaggtttgtaaagtccatgttggcagggaaagtgcttttgttgatgctggtgggccatctggacttcgtagtctaaactcggtgaatctatttatatatccttatggggaattccataatttttacatgtgtttacaaaactagaagttgcatatagatggatgagccgaagataagagaattttaccctggtaagccctgcaaacatttccaaataccacagtaattgtcagtaggttctttatgcaagtatctgggactagacctccagagtccctaaatggcatgagattttcagtgttggcctttgtactaagtgtgagtgttgaaagctgttgggaactacagagatgagaaccctccatgagcttagtgagtgtttgactcctacactttagacagctaagacataagtgcacacatctcacagtgagacattaacactctacagacgagaaccctccgtgagcttagtgagtgtttgactcctacactttagacagctaagacagaagtgctagttctttctcacacagccagtgttcatacatctcacagtgagacattaaccactgttctccttcagaaacttaaagagttttgtcatgtgtggagatctctccccttctccctctttccctcttccccactccctttctcccgcccttcctctttgtctgtttcttccctcactcccacttggagacagagctcatagagtccagattggcctgaccatgaattcatgatcctcctacatgcaactctcctgtatgagaattccagacatgcccccaccacactacgcacttagcatccagtacccagtatgggtggtgctgagaaacagcttgcctcagcctcctccaagtcttactccctaacaatcaaagttgaatcttcatcaaactcttattttttcttttctttttttctcttcctccacaccatgtttttttagtgttaaaaatactatatataatgagttttgtctttaaacaaaagtgagaatcatggctaactattcactgactgcatcattgttgctattgcctgctgggcactggagtttatgttgttcaatctgtgagccctgtctcattaataagggcttcacttcgtagacacacatgttttctaatctaaacacaaaaggaggaggaagtatagacttcagagattgtcacgagcagagagatagcccttcacctcggtagaattctctgccacttcatctctctgtcatattgatccattttataaaacacccaagatagttttaagacaaaaattaactaagttttcaaattttgaattactaagaaaggaaagtttatgaaaatgtttaataatgctgacagtctgcaaaactaaggtcatctcactacatgacttgatggatgagggatgcaaagttggctctttagtgagcgagtgtgtaagtgcgtgactgagtgagtatgtgactaagtatgtgagtgcataactgagtgtgtgagtgtgtgaagaagtgtgagtgtatatgtaagtgtgtgggtatgtgaagaactgtgtgagtatgtgtgagtgagtctgagtgtgtgtgaatgagtgtgtgagtgagtgagctagtgaatgcattagtgcatgagtgagtacatgagtgagagggtgtaagtgcatgcatgaagagtatctgcgggtgtgagtggctcaggacgcttggcttgcatccagttctcacatccacctgtagcccccttgagccctgtcacacactgttctgtgagtgatgtggtgactgtcactgtctccttacaatctgctataaaatgaaggaagtgaggcagaaagacaactcggtgggtacagcacttgctgtacgaacatgaaaacctgagttcagatcccagcacccacatgaaaaagccatgcatgggcatagatacctgtaagcccagcactacaaagagaagaggcaggggattgctgagttttgctggcctccagccttgctctaggttcaaaggcagactctgccttaagggagtaaagcagagagcagtggggcagaacctctgggcttcacataggcacacacttgcatacactgcacacgcagatgagtggaatgtaggattaactgaactgttctgtgacatttgtacattcaggttcagagaatgattaagtgtctcttgcacaataatcttttgaggaaatggaccctatcctaactccctactttccaagcaattatgcaagcagaaactaaaactaaacccagacataggctccagagtcaacaagatggaccacatatgacagaaggtgaaaccgctgctgaccattgatgaggctgcagggtctcctgactcctgacttgggtttgatctcctggtaggggtgccacacagtctgtctgtgtcccacacatatgtgggcatagaaaagcatggtgttgtgaaagagggaaacatagaagctattggcagtgaccttaaatgtagattccttctgttctgatgcaatgtggacctgaactggggaaagccagtgtgggctgctgaagtcccagagatgcaggcagtgtcgggagtggctggcaatgagtgagcaggatgatgtaagggcggtgtgcggaaaggagaagctttcgggaagtagcaggctgcttacgatttcctttgctttatctcttgaacagtgggaaaacgttaaaggccctaagctgtggtgtgatcaaacttcccatttaaagatagctgtctgactgaggttgaggtcagcagtatgaaggcagggaccaataaataggttcctttcatgctaagatgatggttgggagaacaagggaatacagccctggaaatgaagagaccagggtaagctgaagagaatgactttaaagtagtgtacaaaatagcgacattgaggagctcgaagatggagtagataggagagtaagccgagagaggcagagctaggctaacctcggattcaatctagtataactagctgaaggctggtggaggtctcagcctggaagacaccaggaagagcggctcaggtgcaaactggatacagagccccacaagtaggtgtctatactcagcaccaaggcaaaatgatgggaattaagccatgcttgtaaactcacagagaagaaggtagtagagaggaggagagagcaaagtaagggaaagagccagggttggctctgaagagcttccgtgctccctcactgggggaggactcaaactgcaaagggatccattcattatgtggttgctatgagagtattggctacttttcttgttgctgctacaaagtgtcccacgaaaagaaacttgaaggacacagtttgagaagataacattctgtcctgtccagtggcttgactgaggaatatcatttgctcgtctgagaaatactgaagcagtagcaacagggctgggttagagctgagcttaggtcaggtcagatcccagtacactcgcacacctaaccccgtgccttcacaatgcagcgcctgcctgtgcctcttcaccacgacagactactcactggcttcagagtgagcccctgccctcaaaagctcggtgtggagagggctagcaaggttgctcagtggttaagaccaatgctgtacctgacccctggaacccacgggtggaaatagggaaccaattcctacaagtttacttccacatacatgcgaggtcacaaaataagtattattttttaaaattacattaaagaatctacatgtgcaggaatctgatgatttctcatattctctgttcatttcaaatgataaattgtaaattgttatcagaatagaaggctgtattaaatcagcacgggaagttgcaggaagtagtgtacttactggggatccattctgggcaaaggcactgaattatgcaaacttataaggtacaaccgtggctgattttgataatactgttaaataccactcatttttctatgtttgatagaaaaataaaacagcagaaatcctgattagagtctcagtggcgctcagccttcctaactgcaaccctttagtacagttcctcatattatagtgaccccccaaccagaaagttatttttattgctgcttcataactgtgattttgctactgatctgggagtataggtttgtcaaaaggtttgaaaccagtggattagagagacgtgcggacagccgtacatgtgtgggtggttggaagctgtgttatccatgtgaatgaacgtgtgagtctagaccagatagaatctcctcagaagagtggctgcacccaactttctgtgccatggccacaggatttgtattcaagactctagctggcttcctggatgggacccgcagtgtcatgttggtaataagggtacaagtgcagacgcaaatccagggctggagccttctaacaaaaccaggcatgcatgggaatgaacaagacacctgagaactgtaccgtaccataaggtccttagccaaatatgcatcctgtactcacaatccactactctagagaaataccaacagagcatgggaagcagagtttgagccctgctttttgctgagaattgaaagaaatggccaagatagcaagttatgcgtgatggaagagctcatcctggcagaagccagagccagctagacatcagggaggcatgggatgcaaatgggcttctctgcagacagagctggcacagtggtgctaattaaaatcccaatgggtgtatactgcatggagaactataagttaaaatagcaactaagcacactcatttattatcagccatcagtcgttctggctcacagaactcaggactgtgtgtggtactactcttggtgaagctgcagagataggcgtctactcgcggtcagtccttaccgctgctggtggtagaactggagctgcagagaagcaagaaaaggaggtggtgttttctaaaatacatatgcagtggtaaacaagagcaaatcatatatatatatatatatatatatatatatatatatatatacgcatacatatatacatatatatacatacatatatacatatatacatatatatacatacatatatatacacacatatgtgtgtaactatatatgtgtatgtatatgtatgtatgtatatatatatacatatatatatatatatatattgctttcagatggagataacagaggaaaacagtgagtacagctgagttgcacggtcagcaggctggtcagaaaagtcatctctggaaaccatgtctaagcagggtagaaaaatgaagaggaaccagctgtatgataccttaaagggtgatcattacagaaaacagttatgtcatgctcgctatcgtcaaaatctaaaaagagaggctcatggaagacatggacaaagagcaggaaccagctgaggacagacagccttccccacctgtccagccgtgagttcccaatgagagtttatcaaactgagctgaacaatgtgtggtgtccagcaatggtgatcaatagaatagctaagatggcctgaagcataaagaaaagttctttattatcaagataatttattgatttctagcacactctttccatctaaggactatagatcattttgcaactgaataaataagtaatgtgttctagtcagctttgacacagccgaaaaacagcagcatccagcttcaaagtcataaaaagctgcaagatttaatatatttttcttgctgaaaatttttatcttacaaaatactttatggtttatctagcacattatgagcagctttgagattaggatttcagaagatgtaaaaacatgtggaaataaaaaatatgtagcaatgatagcaatgaatcttggctcaagaggactggagagatgggtcaggatgaagagcactggatagtcttccagaggatacaggttcgattcccagcacctgcatgtcggctcacgaccatctgactccagttccaggggctctgtcaccctcttctggccccagccagcaccaggcacatacatggtacatgtgcatgcaaacaaaaaaacacccatacatgtaaaattaaaataaatttggggggaagtggctcaaaatccctatgtcgagattctaagtctgtgccatgagccagccgccacgttctgagccaggcctgatgctgagcatttggcactggacgttaagcgtttgaacactctctgcttacagtggctcggctaaggaccgttcagtgtgatactgctgtgaaagttgtatgcactcagcaggatcagtgcttcaggtcatgggtttggattatttcccaggctagcgctaagcagtgcagccctctctcaatggtgggcagcatcatggagcctaggcaaccggtcaggcactcgatgacgtcggaaccaagcaccactgtgtggagcaatgtgtgacagatcagaagtgtcaggtgctctctccgcttaagatatgtctgttttgtgggttttactgagcaacaccccattgtgaatcttggctcaggggaacagactgacatttaagctccctgtgtagctcaggatataaacctgcagagcttctcctgcgtccgcctccagagtgttgggattacaggtgtgtgccactataactggctaaaacggattagttcttggtcactttagcatttatgtgtcagatgtagactcattatttcctcaggtggcaccgcttatgttcccaagggttaatttgatagaactttttcggtccctctttcccttcctctttcttccttttgttctttgttgcttttaaatcgtatctttcttacttaacctgtacactgagaattttttaaatatataaagcaatatatgttttatataaatatatatacacacatatatatcacatatatatttgaatatatgtattgggtatatatacatatatacctagtgcaattgtttaaagctttagccaaacctagtggtgcaggcctgtagtcccatctacttcagaagccaaaacagaaggatcaaaaattcaaagctagaatgaattcaagccaatgggcacaatgacagtttagtgagaccttgtctcaaaggcagtaagggacccagctcagggtcagagcactcctctgtgcctgtggccctgcgttccaatgccaggactgaaggaattttttgaaaagcttccactgaatcccgtgagtcacactgtgattctagctatctggaaggctgaggcaggaggctcccagctcaaggctggttgagaccacagcagcttcgaggctcagtcttcacaccacccccaggagactgaggttcattcgccgtctggagactacgagctgactcagaaaagtgaagttataataaagacacatgaaagttgcttcaagcggcgtgaaataaaatacttgtaattggagttgctgcagagagaaggagaaagaggcagactaaggtaattgttataattgaagataattatacactttgcactcacagccagccatgtgagggaaaagaaaaaaggaaatagaggcaatatgcttttgtatgtagtgtttagtttttaaaaagagaagcaagcaattcataagatagaaaaccttccagctctaagaagcatttattatgccggggcggaaagctttctggactccacaaacaacacagtgccactcactaatagttttaccaaaagtgcagataaacaaaccatgccagcttcctctttaaatatgctacacaaagtcaccttttatggcatgaaatgctcatgtcataaattcatagattcagctgccacctcgtagagcatccagctcatgacaataggaatgtcctagacaccatactgaaggattgttggtgtcctgcttaacagcagcaggacggtgcccttcagctcccccgaaagccaccccaagaagtggtaagccaggtgtcagatgacgtgcacggttaagaaacatcagagtgtgagcattgatcctgccctcacctttttaattctgacagcaaagcactctgacatggtctttgagggagtgtcaatcatttgggaactgtactaagatcatataccttggcatcccagatgagtcccagccacagaagcacatcttgcattatgcttacacatgctctcagcaagaggaagcagaacacaccggtgatagtggagtgagtgtggcgtctgcttgctcctgacagagtctagtctgccaacttagcagggagcaaaatgaccagaacttaaagagtttggtgcaaggcctcaggaatggagtgtggaaacgccagactcgtacttgtttgtggtataataatgtgcttgctgtgcgataatcataaaatattttgtagatactttacaaacaagagaaggatacagtgtcttaggtttaacctacttaacccagtgggtcaaagcgataaataagactcctctcccagtaggactcactaagtatccatgataccttgctttcctaggtgagagtgttggttttggagtgagattgggttttgagaggagtctcattgtgctgttcagacttgttataaaaccctggagtccagcaattctctcatagcctcagcctcatgccagcgagcaggaggttggagcgtccgccacacctggctcatagggacgtttcatttgttcctgaaaacatgccttcttgtaaaagactcatgagacaaaggtgagagccctccactgtatttcccaccgccaccagtgtggctaagcagagtgtgtgtctcacctccagatggcacaccactccccctgcagccagagccatgcaaagcttcaatggtagaaaagggtgagtcttaattacgcaagcaggatctctccgagttctgatgtggtctcgtttgtttttcttttgttgggtggttttagttttgatttgttttgttttgtgttttagttttggggctcaggagcttgggagattcttggactttgctgttgttactttgaaacatctttctaggtagccctggctattgtggaatttgccatggaaaataagttggcctcaaactttatttgtttaattatgtgtgtgcacatgggtgcactggtatgaatctagattctctcaaaagccataagtatctgatgccctggagctggagtaacaggtggggggaagccaccacgtgtgggtgtgagccaccaagtgtgggtgctgggaaccaaacctgcaaagagcaacaacttctcttaaccactgtgtcagcctctgacttacagttcttaataataacttacgttccaataatacccatttctttattgtgaaattaatagagctacctcagacactccagaaaggcgtggtcctctccattctccttagcttacttagcatatcttagaatgtgcctttgccagtcggagtgttccacttcaccatctgtcgctcctggcttctcagtgtgatacaataacattccccttccagaaagaaagagcagtgagggccaggggtgtcagagctgtccttcatactcgctttcattgtacaagactagaagatgtttctgcccttccctttccaaagacagcgggcattgtgggtagcagccatattgagtatctgggtacaaagtactttaaacttaatgaagggaaagagctctccctaacttttcaggtcagtgcatccgttctaagttcctttgcaaatcagccctaacactgtgacaccgacatttcaaactcaatccctgcatttgggaacaactgtgacattcaaccataaaaatgtccgtataacagtcttaagacttcctaagcacagtcttaaggcctccattttattcttcattgacagaaaagatggaagctcttgggggggaacgatgtgattttcattagctgtgaggtgttcacaattggatttgttttcagttcattaggtattataatcacattagttatgtggttttatgaggagcacagttggccctgtggacttcctagagcttcccacgggacacacagcggaattatacttttcctttttcaggataagccaagaaaaagaatactatatgtagaaaccatgcccccacaaacccgttctcacccttgatgacagtggttctcaacgttcctaatgctgcgaccctttattacagtttctcgtgttacagtgactcacaaccataaaattatttttattgctacctcatgactgtaattttctactgttatgaatcataatataaatatctgttttccaataatcttaagcaaccttgtgaaagggttattcaccccaaaaggggtcacgacctacaggttatgaactgctgctgtatagtaagctctctgcctaatgctgtgtcgatcttaaggaactgtgaacttctaaaagtttgaagagtgactgccatctcctggagtccccattggggagataaacaagtatcccatggcgtgcattcagagtctgagggtgtacgttgtgatactgtgtccctgggatggaagcaatcatgtcaacttaccaagaggatgcagctgtctgtcaggtgcgccacatagcaagacagtgggaggaagctgtttggtacgcaggagcagtgacagtgaggacacatcagccgctcagtgtggatgggacaggctctggaagactcacgtgctctaggctttattgccgacttccatattcagtcagcttggacctcagcagaagacctgagggttgggtctggcgtctagtttcacgaatgcctcgggtgttccaaagcaggcttggaacaggtaaaggaaagattctggagggtagcctcaggtgcattgtccctgctctgttcctgtatcccacagctggcaaaggaaaatagggaaatcaaggtactgaagtgtgtagacacatagctgcgtgcatatgtgcactgttcttccctggccatgggcagcgtgctagagcaggagaaactgccctaagaagtccctagttcagtgaatgtccagcacccacgtaaacagccaggcgtggcagagtgtgtctgcaatcccagggctctccctagagcccctaaccagccagccagccaaatcagttagctccagcttcagtgaaagactgtttcaaaagataaggcagaaaacagataagatatctgatgttgagagtgggcctccacatatttacacattcgtgtacacacacacacacacacacacacacacacacacgcatgggctcacacacacacacacacacacacacacacacgcatgcgcacacacgcgcgcacacacactcatggatacagcgcacacactccctcccctcaacaagtccattcttccatgtctcgcctttcccaatcacagcatgttccatgctgcagccttagagacagccctcttaccctcccccaccccaccccaccccaccccaccctggcctccattttcttccccaggtgatgtgactggcgaccagtaacacatgcttccctgagatcttcagaactcctgccacccccacttaagatgctgttacatttttaatctctggtcttaaatataaaacagaagcacgttttcttcccatctatgctgacacctcctgtccttggaagctagcccatccccagagggcagctgaccctgctgggaggctgcacacacgtgggcggtgggcctttccaccctgtgaacatgcaaagactgcctttggaattcactcgacacattgaggacagttctcagcttgagaccacagcagtccaaggcagtgcagctgtgtgaattctgtggagcctctgcagccatgctacacagagccaagctgcggggactgtggcagactgcgggctcagatggaacacagtgagggacctcacagtcttttgctctcatcttgcatgcttgaaatataacgctaagctgttttcctacttgtggccaaaaatatatctctggttgagaaagtttcctcttacaaagttgacctatttctcagctcaagattggatgtgtcctgcttagcacacagttgacagttagggaatgagaatataaaagaattagaagtgtccagaggtatgagtcaagaagccagtaggaccaagccaaggagctacttcctgaccagtaggggcaggctctggaatgtcataacttcaggacatcccaggctgagcacacactgaaatggctcccgctcaagcctgccatctgtagggtttccaaagaacaagcaaagagcttcggaccccatccggcaggagtgtctgcgttggtttacaggaatccctggtttacattgaatccctgggctttgccctgttctggcgtgtttcttagaggctgttggatagctcatgaatacgtgcctaggctaaggatgggctttctttttctttgtttcatgatttctggagagacacgtttttcactacgtagcccaagctgaaccctaattgccagttttcctgcttcagcctactaggctagaattacaagtatgtgcctgtaatgagtcataaagtataatgccatggagcactgaggacaagtcagcatacaccatagatcatggcctgatgctctggaaggagtgtggggttgcttcctgccactacatgctggccacaaagactgcctgtgatttgttttttcccttacggcatctgtttaactggttgggctcactaatacttcccatgacactttctgagacactcagacagtccttaagaaccaccagtgcagcttttgtgcctatatacacagttctgaattgttggctctgactctgagaaacacagccatactcataagacaggagaagctagaagctgggaaggactctaaaatgacaacatttctcaaaaggggaaactgaggaaggcctggggagcagctcagtgggagtgcatagagcagaggctgcacacagcacagagtgtctactccctgaacgtctctcagtcattggacagacacaacagccttgtagttaagtgctgtgggaagagtgaacgcttagacttctggtcacatgctcttcaagcaaggtgatggccaggtttcagcaccagggaactggccacaaatcctccagctctctatcttgtgtattgtatggatgcatcatctgtcaatttaaaggcctatggcctataggaaagggtagaatagaaggagagacatctgggaggcagaaagagttctaggaaagaaccaggcatgagagattcacctggaaagctgtgacaagatgaatgtgtgggacctgagcacaggtaagcagccaattggcagagtgttgattaaaataaatgggatgttttaacttatatctagccagaaaagactccagctatatggtcaaggtctctgtagatatatttggagtctgagtcttatttctgggagcatgggaatgggtgggagaacaggacccaactaatacagatgacaaaggttctactgacaaaactcaagtatcttatgacatgagctgaggtgaaggtcatgggttaccctccagacagcaccttgaaatgcagcccctgcacaatggctgaactagacccttcaagtcatcagtgagtagctaagattacaggcctgtgcaagcaagccaggccagaagggtgcgggtgcgttttcaacacactccctggaagtgatgttcaggactgctgtgtcagacactgtgctgcacaagccatgctccatccttcgtctcctgcaccgtggggatggattgctgtggcacagagaggctattacagacagtctgctgccatctctggtcttaagttttgcttctccagtcctgagggttgagcatttttggatatacagtggtatcagtgatgcaacagagggcactaagaattacccctgtcctcatgcatgtgtgctgcatgtgcctgtagctgcagaggctccaggtcaacagcagatgttatcctcttacagcccaccttacttctgaggcagggtctctcgctgaggttggagcttaccatttgtgctatacccactggcggcagagcgaactctcatgtcgttttactcccagcactgatcaaggctggattttgtgtccatgccaggggtccaaacccagttctcacgcttgtgcatcaagcactttactgactgagccatctcttagccacagatctgagctttggaagtactgtgagctataagaggaggatttggctgggagacatttatgaggaagagttcacttttcaaataaagaagcagaagtttgtttttgttgtcttgttattactctgaaaacaaaggctgagtcagcgaacctcagaagccaaataaagtgggtgtgaagcaatgctcagttgagtgtgacgggagctagcactgggctcaggaagcgtctgcaggtgaataccacatgcatcacagccgagctgctgcaaagtgccctgactcccacagacgacagccagggatcgatgccccaggagaatgagcggtggacaaactgggcgtcatcccagaggatgatggctgtagctccctcaccttcacagtctgccatcctgcatgggggatatgaggccagctctggatggcctctgagagtactgagggctggtggagtaggaagcccttctctgacaaggccattaacacaaaggcccacaggattaaataaaacataaactagatgggctggaaaggtggctctgtggctaagagtacacagtgcctcagagttcagccatgcacctataccaggtgtcccacaacttcctgcaatgccagtctaggatgtctgacacccctggcctccatgacacaaacccacacatagacgcattattaaatataaatctgctattaatcacaaggtaagaggctgatgatattgactcatctatggttctggtggatttctctgaagactggagtcccagctggtgtatagcctcctcctcgggttctgggagcctgggtaaaggaaggtgattggtgctgtctgtgcacagagagacacagaggatcagtttgctgtgtcccagtggcctggcaagcaaacctgtatcactcctgctcctcatagaaagccagcctgaaagctgagaaaagcaacttcttgctcgaggcctcctcagaaatcctgacgctctgccaccttggaacacttccttctgaagatgcattctgaatgcccactgtgggacacacagagagacccatggaagagacactgaagtgctcaattttgagtaatggtagacagaaaaattccttctaagatggggccgtaactaaatttggagggagaaagggttgtaagaagaggggacctgttccagaagcctggaagctgagcgctaaaggacaggacagtgtcagaggagacggtagatgaggctgtcagtgtgtagaactctcaagggagggggacagggagtggtcgtgtgtgagagttaacggggagactgctggctctgagactcatgctcaagtggtagtggtatggctgtccccagaacgatccactttgctggttccagagtgagggtctggccccaggacaccctgggctccttcggcttctctcccttgccatgtaagccacccctgcatctgagagtgcccttgctagtcttcccggaagcatcctgaccagaacctagttttcagattatgaagatgctgaggtttttaagggaaaagagatgacttcatccctgccctcagagtccttttccgccaggtcaaataagcaagcatgcagcaaaaaaggaaggatccccaaatccaattgcatgcttgctgagatgtccctcatggcctgaggcaagcaaagcctcttcctctgccaccctctgatcacaggctacgtcaccttgacccagatgctcagtgaatcccagctctgtctggagtatgtgcagcacaggctgctagaaataacaaaccttctctcttctcttgtcctcctcttctcctcaccccccccccgccacccccaaatccacactaaatcaaaatgaggaaaagcacttaaagaagacgttcccctccctgcctagcactagctggtgctggtgctggtgctagtgccggtgccggtgcgggtgtgggtgccagtgcaggtgccggtgccagtgcgggtgcgggtgcaggtgctggtggtcatagtcatcgtcatcatcatcgtgatatcttaccacagtgacagaagtgaagttaggacagagggcatgaaagggctgtcctggggttcatcccctggcccacacatccatcattttacatagggcagggatttaccagagaattttgctcctcctgactgttaacttgtctggttggttcatttgtaacccatacacagtttgcatacctggtactgacagcaggagccattcccatggggctggcaactctgccctccctggtcccttaggagaggggtcataaaccaagatggtttctgtcatccttaattacaggtccacaggacagctgtgaagccataataactatcattactgacctgaacctgcttcaaaggggctgcaagtgttcgcctccctagataatctaatctgcgggccaccccagccctgtgaagtgttattatagggcaggctgtgatctgagcacctacctgcttagagcgtctgctagaaaagtgaacagctgccctgctctgccccttttgttcttcttgctggtatttgctttccgtcctcttggaattgatttgggtggctgatagtccaagctaatgaagaattaaacaccaaacatgaccaaccacaattattcaggacctctccatgctgctcaggcctgttcactgggactgaaactagggttaggctgccaccttgtggcttaaaatacctgctttaaagataaaaggccaatagtttttactaatgattgaaatcatttactgatcagtgaaatcatcaaatctgtatatttgacaggatgataatagattgtggagttttcagcacaaaatatctatctatcttgctaatcccaacactctgcaggcaggggtggtagaaacaggagttcaaggccctccttggctatttagccaattcaagaccagcacatggtacataaaaaaagtaagtagcagaatgaatttcagcacaagtttataacctgaagtacccacctgagtcaaggagttgtgtgcccgagtcatcagaattgccatgcttaagaggggcgggaaactccactgccccttttcaggactgcaatgtatttttattcatgactgtctgcaacttgattggaatcagccagtgtatccaataatgaagcacactataaagcaaaaagaccttgtgcacaactgttcactgctctctagctgtgttaacactaccaccttctggagctcagcttggtgtgatccacaggtgtcatagtgtcacttgaggtcagtaacggtcagcgggactcctttgccctgagtcagatcatctcaggggtgagctagaaacccaggacaatggaagcgcccaggaatctacaagaacaaccctagtaaagactcctagtagtgggagagatggcctggaacaatagtctcctataaccagacaagacaagtggagggattgagacataacccagccacaaagccttcgacttacaatttgtcctgcctacaagatgcgctggagtggcacagagaaattgtggaagtgtccaacctgtgactggtccagcctgagatccatgcaatgacaggaagcctaaccctggcactgcccagagggccaggaaccagaagctagatagccagagacttaggatagaaccaaacattacaggtcccctcacaaaaatcaagtcagtgaaatgattcctgaatctcatagacaggagcccggcataatcgccatcagaaaggcttcggcagcagctggtggaagcatgcagagacccacagtcaaacactaggtggggctctagaaatcctgtggaagggggtacggaaggattgtgggagccagaggagtcatgggcatcataagaaaatccacagaattgattaacctggactcatcagggctcacagagcatgaactgacaatcagaaagcctgcatgggtctgacctaggccctctgcatttatgttatggttgtgtagcttgatgttcttgtgggactccttgcagtgggggcaggggctgcctctgatcttttacctccttgtggggccctttcctcctgctgggtcaactcatccagccttgataggagggtttatcatagtatgactgcgactttcatatggatgtttagttcataccagattgcaggcctgaccttgtctgaagggaaaaggaggagtggatggggagggggagggaagggagaagagctaggaggacaggaaggagaggaaagtggtcaaggtggagagaggaataaatttttaaagattttttattaaaaaaatatttatatatgcagtcccaaaatcggctgctctttgtttttagtaaggttgtttgtttgtttgtttgtttgtttgtttgtttgtgacaggatctatctttgtagtcctagctgtcatgggactcactctgtagaccaggctggcctcaaactcacagagatccatagattacctatgccatagattacctatgcctcccaagtgctgagactaaaggcatgtgccaccatgactgacctacaaaatcagttattcacgacgagtcttttccagaaatgtaacatgcaccctacgtaaggaccacactcccatccctgccaagaaggcgaagagcacaaaagtcacaccatacacatgaatgggagtgcgttcacacagggagggtacattgcatcgccacctactgggcaagcagtgtatctacacaagtgggcaggaagttgtaaagaagctgggttgtaaaggagcctgggaaaattcaaggcagtatccacgtgaggtgttggtggcagaattatggaggcagatccagaaagaggtggagaaaaaagagtgtaagatctctagaacaggaatagtccactctggaggtgagaggtgtgactgtacacataccctgatgccacgctcctctggagaccgttttgtctcctgtctctcctccgcccctgctgtagcctcagtcctccagtcaagtagcagtggggcactggggtggaagccgtctgtggctgagcctgaggttttaccctggctccccgaagtgaaccagacaattactcttctcattatgagatttttgtacagggcaagagctggggaggatttctttcagtggcttttcatgaagttctaattgaagggggtaagctgtaagttccatcttttattcagtagctctgagtgtccccctttcatcctccctccctggactgtcatgctaggctggtaccccccacacttcacctattccagcagccgcctcctgttaagagaacaagaaagaggaaagatgagacgcgttcagaagtggagggagccctggagagccctgcgtgcaggctcctggtgcacccgctgctctgccccgagcaattccacagcagctatcatctacaaagtttgctctttataaatcacattgattaatcagggtgtggatgaagaaacaaaactgtgtgtgtacaagagatggatcctttgtctgtgtttctgaaagtgtttcatgatttgcagctacacaaaattatatcagaggtcactgtgacttaaatgctctcccatgtgtattttagaaacctgtcactgcgggcacggtttaaagtgaattgttctttgtctcctgaaatgtggtggttacttacccatgcagaagcaatttgtctgtgtgtcacactgaccctgttgtgtttgcagacataatatataaccaggggaagttccatattacccaagaaaccccaaagcattatagcgttagaggggtatccatgcgcactggcagacagggcggtcgggtctcctcggctgtactctacctcggctatgggcttccttgaatttgcaggtagatgtttaatagagcattctgcctctgttgcagtggcttcgacttaccctctttggttacatctggtttgtcgctgagatgccctacaggtgccagcacgtgcgcactctcagacggccacgttactacagtaatatcactgaaccaagtgaaaatgtaaaaattcgtggtctttctgcaagaaaaatttagttatgattcattagcctaacacagaagtcatgttttcttccttttctgcttgcttgagcataaacttcaggctgttcctcttaattagaatgttctggagctaaccaaatgggtgtagtttaaataaggcctctcttaccacagctaatgttagcctggtatgctcctctattctccgtatgtctctaatatggaaatatttgacagtgtttacaaattacaaaataacaaataaggagcactagcctgagcactgtcagcagcatgatggcgggaacagagggatggtccacgtggaggagaacatggctgcgtggagaccgggtccaagtggaggtggtcagtgcttcccctggagcggggagcagtaactgcgagagcagtcagtggcggctgggaactaagtgcgggtcttatgcctgctctgtggttccttacacattggtcttgccctctgctaaggtcgtgtcctcagcacaagcctttcctctgaaggtgaatttgctgggtacccaatatcagctcagtgaaagctcctccttgaaagtgaagccacactctaagtgggcagcagtctgtgggcgtgtagacagacagacagatagacactggttaatctctagctctaaggaaaagggcttgaggagctacggggataaacagaggcacgggaaggaaattgctattttgcaaaatatgtgtctaggaaaccagtgagatggctgagatgtaaagatgctcaccaccacgcctgacagcctccacagttgtcccatggggcacatacatatgtatgcgcgcgcacacacaaacgcctatataaataaaaatgaatttaaaattgaaagttaggaattacgtacgcacatacacatgtgtagcaaacatttcatactgccttggctaaggcgtattaacgcaaacaagcatattttgcttgctttggggtgctggaagtctttattgactcctcatactaagatgataaactacccactgctttggatgctctgctacacactggtgcatccccagtcaaatcccatgtgaggaaatcaaacatcacagcacagacttgaagagagccagccaggttccaggcacgcctaccttctgtgaacatcgccctggcggctgtgaggccttgctcctgacagggaggctctgtgtttcttatgtgaagtgctgctagagacctttcagattctgaaatagaggtagctaacctggagagaagacacaggtgtgagcgtggcattcctgtggctgtcggagtctcctcgtacacaaccgtaattttacatggtttcagcacacatgcatttcaagcttctgacagcaccacagcagcactcagcaatcaggtcagggttctttctggtttgggatcttgatatcgggactgctcagcctttcccgggaagggattctgaacgtgtagtgtcgttctctctgcaggaggatgaagccttctagacccatgtgatctcctatgaagaactgaccccacctgctggtcaccccagctcccaccatgggccctgcaggaagcgtactgagcagtgggcagatgcagatgcagatggtcctgtggggaagtctggctgccgtggccatgttcttcctcatcaccttcctcgtcctcctgtgttccacttgcgacaggttagaacaaacatgcatgttctagagcctaaacctgctgttttccctgtgtcccacggagcctctttattaagagcctccctggcccacattcatgggttggtcacaaagggcattcttcattcgtcaattgaaaatgcttattgatcttcctggagggcaaagcaaagagcccttcctatctaaatgtctggaatgaattctgcaattctttgagcacagtctttgtgtgctgtctttggccatgggcatactgaaatctaagtgtgaggtactacatcctgttgccacagtgggaagtcactgagggtgctcactattgcgtggcctggagagctcacatattagtaaaactgtgtgtgataaactgccctttaggaagacataggcttgtatttcctacaagagaggctcactgaaaatggaagccttttttctctttttttcagcattatacttgtctcccttggctcagggagaagtgaagttctttgtaaccaagacggatgcccagaactgtcagagatgatgcagggtgcagccttctggtctagctgggagccagtgggaaccagcttagccagctccatactcaactctctcgatttggatcccattctaaaatctgtcaaaaagagaaacccatgccctctggcctctgcagcctctcctagtccctgccaagcaaggactcaggtcttgaaggacaggacaagcctagagacactagacttggctccccaaaacttcaagaatctgctactgtaatgactcactctcccgctaggtgtcaccctcttctcgccacagatagaaatgtggtctttacaaccaatggctttctttagcctgttctgtgtaaaacacattctgtttttactaggcagacttttccgtagactggaagtacctatgactcatcctgagagaatgtcacctccctgatgtgccaaagtagtatctcccatattttctctcatcccttacggcacgtgacttcacagactcttaagggagaagatgaggtcattgttaggatttgctaaagaataaaggcagtgtctgtcatctgagtgttccaggcacagacagatcctgcttgcagcccgctgtctcccgtagtgaacttgaccctctgggaaggggtgtgccagaagcgggctcagcctttgctgtaggtcaggactttttctgatctagttttattaacctggttaataaaaccagagaggcggagctgataaatgttaggctagggaagtatggtgtccacttcactttaagggacacatttgacatcagaatggtattttcttctccctttcagagagaagaagccacggcagcatagcggggaccatgagaacctgatgaatgtggtaagcctcggtgtggctgtctgtctgtccgagtacacctctccaggcatggcgctactggctttcgacacaactgaagctggcatggggacgtaaatggatattagctgtggctttctgtatactgtatgtacggctgggagcctggcttgaccagtgttcagggtagcttctgcagagatgtcttcatgcccctcctggtctgggagggctgtcacaaggaacaactagacaattcatctaagatttcttgtctctctgctctggagagcagagtccagcattcagtgttgtcacacgagccccttccagagctagatctgttcccaaactcagctccttagtgcacacccacctagtccttgctgtcaccttccctctctgaatgtatgtcttgaagccaagatagcaactgtacctctctgacttcagtcctaactagtgccatctgaaatagccctgctttcagatgaggttaggctgtggcactagggactgagattttggcatgcatttgggtggcgctgcagccattcatcggggcctggagcccacagcatagcttggccttggtgcgttatcggatcgtcagcatttgatgggatcctgagagacccagcagtctcaaggagagagctgtccacctgggtggtgaccttttgttgtgcccttaagtggcagcagcctcagcagctgtgtctgcagggctgggttgagctcccgctgggccccagggcaggtctaggagagagggcgcttcctgctcccagccaggaagcacatatgcatttaaactctggggggcctgggctgtttgcacccagcaagcatgttcagagcacatgcgtgaggtaccaggctgcctgaacccccacttcccagtgtgcctgtagcccaagcagacaggaagctcctcctggaccccagccagggctctcttcctttgtctgagaccacccatcacagccaccccggacctcagcatctctcctgccctgactgatgttctcctgctattttcacctcttatcttgtctcactccttgttcccagtgtctctatgctccccagtgcttgcacagggtaggggaggaatggggggtggacagataggccctgtctttcttcagagcccaccttcctcagtcaggtggacaggaggttgtggctgaactcaactcgagcctcacttcctcctagtgctctcaggaatggcgagacctggcagctcaacctgagtactgtatgaagccagtgttcaggggtgggaccaagctttgccggtcactctgatatgggcatccacatgaacgccggtcattctcgatctttcatccccgttattctgcctgaggacagcagcctttgcgggcagggagagtgccgcctcttcattctcttccccacataggatctcctccacacacctccaggacagactgtatccacaggatgcctgctgacagtgccagtgaggcctgcacacagctgcccactgagctcctgacttccctagaccactcccagtttgctgacttgtttctcatgggggctaagatgggaaagagcagttcagacagagattatagaagcttggcagtggcgtgctatgcaggaagccttcccttggtccccctctctgtcccctaaggacactgtttctccaatatgagcatctcagggtcctggcaaagcacaaacacttcaagtcactttatagcagcagatgcgagcagtattggcccaaagagcagacttcccggacactggcgcactgctgcacttcaagggctacttattatctgttattatttgatttcccatcagagtcagtaagattgtgaagccagcgacccaagactcctgtacaggttgcatcagaatttccctgtgatatcctgagacctgggctgtgtcttgggcagcagaagccattaacatgaagagggtagggtccgacatgttagacagaacacatccagaagcagctgctgtcttctgccctgtgaggactctgcctgccatgttgttccaggcagtccacacagcaccatcagcccagaggaacaaaatcagttctcccaagtgtctgtgcatctctgaaagtaggaaaggtttgcaaagcaattattcagtagatgatcgtttcaataaagctcggaaataggctcgggaatgtatagcattaaatgctgtgttgaccatgtttaaatctcttcctgtcgggacactttgctgtttgtttgtcaccacctgtgttttagggatggcattgatccctgctgggctctgttctgacccacacaataatctgtggtctccattccccttgagctaggaaaacacagtgtacccgtagcccatctgtaaccacctggtgagatgcgctgcctgcagtcctgggagacccccagtgcctgagagaccagaaccatacttaggaaataagttcagccattctccattggagaaagtggtccccactctcaacacttgagtttatctagttatccatggtgttcagtctaaccgttcttgttttacctaactttgtcaatggactctggcatttctttggctgctttgatttttggagtatccgctggtgcccagcagattcttaatagaagatgtgtttggatttttcagccttccgacaaggacatgttcagccattcggcaaccagcctgacaacagatgcactggctagcagcgaacagaacggggtgctcaccaatggcgacagtaagttctgcagaggaagcactggggagccttaggctttgagcaaggtgctcgggggcggtggtgatgactctgccccagggttcccagcacccacgtggcagctcacaactctccctgactgtagttgtaggggagcctccgcacgcaccaggcatgcaagcgatgcagatgaccagtagggaatgtactctatcccagtcattgttactaccagctagaggcctcatttgcatagtggctgctggtgccgggtaccctcttggagtgcgtgctgtcattcctttcactgtgcccacacacaggtggcactgtccccagtctaagtgagagcacagggctactggattaagttaccacagtctaatgctgcagtggctggagtgactgacagctggccaggtcatgagtatgaggtgtctgcctgcaccctgctgggggctgatggagtcacctgcctgcatcccttcctgggttgcttctcccgaatcatcaggtctttcgctagcctttactctttcactgtttaggactatgcagtctcttgtctaggtaaccaaggtttctctacccagcccaatgttggctgactacacatggggagtgggcaggggagggacagcacactcacggagttgctgtgtcattcagcatgtggttgccagagactaggacatggacatctgtgagaaaccaaatccttgtcacagagtcattaataacctgactgatgttgttatcccagattttgagaatctgtaacttgaagcagggagcccagctctaaggcagacacttagtctagggcaggcatgttgttccacacagtgtgcactgactggcaggtggagtcgcaatgatttcttcccgctttgctgtcacccaaggcaaggaagggaccttgaaggtcatcagcagtggtacccaaggctgcaggtgccagtgcccctgtgttctgagaccagatagctagagccccagcaggagccactcctgcaggagaggctaggactctaagcctggctgctaaaccctgcggctaagggtttcttttcctctccctaacagatggctggtctactcttccatacaagtatacaatgtggtttgctcccgctcaccctcactcccctctcacctccacgcatcctgctaaccccgtcctcttcccagatgccccctcctccggttttggctcacttgggttgttgttgttgttgttctatgggggggggggggggagctgggcgccatgagcagctcccagctgacacgatgctgctaatttctctctgctgtacagtgagatccagttcctaatgaacttgggttgatataagcaccctaagagcaaattccattccacttgcgtatggtcgaacagtctctggcacctagccaacactcaaaagccagatacgactgaccgacaggtgtcatggtcaccactttagaggcaattcaaggatgtcctggctggactccttctaagaggaggcaaggatgtgaggctgcagtgatgtggaaagagggcacagagtttccgggctcttttaatgatggcctaagggtccatcatggtgtctcagcttctgctatgtctgccagatggaagagactggtgaactgggagtgggaagaggctgctccctcatctaggcagggaccaactccagtcaggggaagagaggacactcatgccccatggttttagagtcttgtagtctggtcccaggggttgtcaattttgtatgctacactaggggtaaaacccagagcccgtgtgtgaggcaagccctctgccgctgagttactgccacggcccgccctttacccagcctggtcttgaattcagccttcctgactcagcctctgtaagaagccccgcccccagccccacctggtgcctggcaagcctactgcctagtgggtttcagcaggagtggtacgtaatgaagtcaaagcatagcccacatcatttattcaattttgtactgggaatgctaccgtgaaccggttcctttcaatgtaatggaaataagacggtgcattggcactgaagtctgcaactgagcgtcaggtaaaaccaggtttgtagtggcgacatcgtggtccacgcactggttattcacaccttttccccttcagttctttcagaagacagcacgctgacctgcatgcagcactatgaggaagtccagacctcggcttccgatctcctggactcccaggacagcacaggaaaggccaagtgccaccagagccgggagctgcccaggatcccgcctgagaacgccgtggacgagattctcacagccagggctgcagacacggaactggggcccggagtggaggggccctacgaggtgctcaaggacagctcctcccaggagaacatggtggaggactgtctgtatgaaacagtgaaggagatcaaggaagtggcagacaaaggccagggtggcaagtccaagtccacttctgccttgaaggagcttcagggggctcccatggagggcaaggccgactttgctgaatatgcctctgtggacagaaacaaaaagtgccgccacagcgcgaacgcagagagcattctgggaacttgcagtgacctggacgaggaaagcccacctcctgtcccggttaagcttctggatgagaatgccaaccttccccaggagggaggaggacaggcagaggagcaagctgcagaagggaccggtggacacagcaaggtgggcttgggtcatgctgaggctaccgctctgagaaatacatatataaatactagcgtcagctgtgcctgcattttcaccctctgagccttactgagagattgatgtatataaaacctttctcagcatctcatttagatagtttcaagattgtatattatatatctacttagactgctattgctgccttcatattgaagactaggaaccaaataggcagactctttaccagacagcttccctcgtctctgcctcaggcagccaggtaaccttgagtctttgaggagagtcccacaactcagcgcagagcggcctttacagagagtccggatgtgcagggcccctgcttgcaacttactgtgtatattttcctgtacaccagctagcagctcttatttttcacaagttcctaaacaatattttaaagtcatttctaagatgttagcagagatctaaagtacatcagtagtccaccatagtcttcagtgcatgtgtcttacagagtctgcaccatggtgagcctctcacctggggaccggccagattgtcctcacagaataactaagctgcactgcgtcagtctgctaataccagactgctagcatcttccagccgcagcttcctctcgggcctttgcagggaggagcagcggaggcagcagtagcattgctgacgggcagccctcctgtggctgcactggttgtattatgaggtcgttctttgcactgttctgagtgagtttgtttcaacgttttacattatctatgaaatcagctgttgcaaacaccatcaaagtatctgtaagcattcccatgaagtgcagtagtttctacccttcatataaccaaagacagatgaagccaatataagtctgcactgcctaaactagctaaagctttttagtggcaagcacttggaagataaaaaggttagttgttagtaagcagttctcccggtttcacattaaaaactggaaatacacatctaaattatctcttcacattatacacgcaagtaatcttccatggaaacaatgccaattttatgtgaactaagaatttcaaaggtttaaatgtttatcaaaacaaagattttattgagcatctactgcatgccttctaggtgttagttaatacaccagtgaacaaacataaattaatgaaaaccccaggtcatgtggaacttcaactttaagcagagctttaatacagtttaaagggaaaaataaactaacggagattagaagtaagcaggggtggagtacaccttggacagagttgttgtgtgtgacggtaatcctaagcagagttacggagcaacgaagaaagctgtacatgtactctttgggacattgtacagcttgaccacttggaagcccctaagttatagcagtggctggtatacagagggagcacggggtaggaaatagcaatggacaaagataagggcagtttgcagacaggtacctggatatgaacttagagagcctaggctcctagtcaggacagaggcagtagaagtgatgagaagagctagctatagccaagagctcagctgggggtggggtgtcatgttccaagggctggcacagctggtgggcacaggaaaccagcaggaacccagctggagtatcacaggcaagcaggagctggggcagagctgagcctctgtgtgtgtagcatgccatacctttagagagcaggactggtcccaattttgacatagctcagggcagctgcagaatgactggtctaaaagggaaggctgggactagattcatatggtttaggaccagtagcagaaatgtggtatttaaacatatagggttagatgagtgtcttttagggccagaagagccccaggaacagggctctggggacggggaaatagcaggagagaccaaaatagggacaaaaaccaggaaagggagcagggttgctgaagaccaggtaaaggaagtgtagggaggaagggctgacctcaggtcacacaggacaagccacacatattgatgtggccatcttgagggaccaggatgaagagtttctcagacttgtgaaggtggaaactcagctggaatggctgcgaagaccatgtgaagaggagagttcatctgaggctttattgtaccacagtgagaagaggacagagctaaaagtccagttgagcttgtttgagcgcagtgtatggcaagaagttcgtttgtagtaaccaagaagggactgagggacagtggggacagggtagagtccaaagaaatgtatttgcctcttcaagttttctcagagaatccagaaacaaggctgtgagcttgtgtgcaccaagtagatgggctggggaggaaacgcaggtagagtatgccttagagaagtggcctgagtcagggagccgctctcggggcccacccactgggaagacagcagaagaggaaatgaagggggaaaggaagaagtagctacattcacagcagtgttgggattacagagaggagctgaataaggaaagctggcatggcgaagacagagagggacgaagaggaagttaaggcctgggccagtgaaggactctgggagacagagaagcagctgccagtgtgggagagacatggtttgcatagatatggcttggttggaatgaagaattaaggtcataaatacgttagagatagttaataaaccaaggtccaaatcacagaagaaccaggaaccaaagtcaaggagaaacagatcaaggggagactatgagctgtggggttcttcctggtgatgccgcaggctgtcggatctaactgctggcgtgccttgcagaactgcagatcagcccttcctcggcgactaacatatcagaagacctctgtacaccgtgaagccgccaggcagccacgcgcaggcacggtcatggggtgctgatgcaggcgacgcagagctgcctgtatcctgtagaaataccgtgaaagcatttgcataggcatggacataagtgctaggctaaactattggcttcagactgttttactctgttttgttttattttatttttttgacagagatttagttccttgtcatacaagtctcgggaagaagacccgactcttacagaagaggaggtaaatttcaattcttttcaaataaacaaaaaagtctgaaatgtagatcttgtgggctggagaggtggtttagcagttaagggtatgcgctgcgcctgcacagggattaagtggctagaccctagctgggctgggcagcctacaaccagctgtctgaccggctccaaaggattccatgcagtgcttctgcagtccacaggcatctgcgctcacatgcacaagcaactttaaaaataagagttaaaaaaatggaagctaagtctgtaatcccagttgccataaatccaatctagtggcaaacaacaacccctgtcacgcaggaggatcaagagtctaaggctagccctggctatattaggctagcccaattatctacataaaccttaaaactcccattactgaggtatgtcagggcaggagcttaaaggcaagaagtgaagcagaggccatgaagtcctgctataaggaagcctgttttcttatataagccactgtcgcctgcctaagggtggcaccatccacagtgggctaggctctcacacaccaatcactcggtttagaaatggcctctaggcttgtctacaggccaatcgtacagaggcccttttcaattgaggctctttctcccagatgattctacttacaccaagttgaaacaaaacacaacaacccagcctacagtcatggtttctctcaaacgtaatctcagggcctacttgcgggctggagaatgtttatttcgttcaatgaagcctacactgcttggcaaaaccctgccaccacccctccccccacaaaacttagtgcttcttccaaggataaatgtcctgtgattgttgcctgggtctgaaaggcatgacaagccctcaggcctgtgcttggatgtcaaggctaagatgggaaggtatgtgatagactgtgaaccacaagaatggcagggtgtgtaaggaaccaagtgaagggcactaggctgcaggaagggccggcccacatgaacaggaggaagaacgagggtaagaaaacaaggagaaggagttctagtcaacagctgggtggccgccatagaagaaaatcagcggtaagctgaaaaattccaaaagtcagggtggttgggagacgggaaatgtctccctgaggaatgctggatactggtcacctcagaaaagatgaacccagataaggctaacatcacttgaggaaaccagtgagaagagatgaggaggagtatccaagagccagagtaaaaacttaggagacttagtgatgccttctaaacgctgaagccgtgattatggcatgcagcgtgctaggttcggacacagtaccagacaccttccctgctcttgctgcacatggctggagtggaaggccccgtgtgggccctgtgtgcctgtggagccacacacacaaagcaggagcgttgccttgtacagagaactcttgagtgcagtgcaggaagatgaagcatctcggagctcaaggcataattcccacagaggatacttcctagtccccggcatgctcctgttctcagggataggaactttcacctacctatttctctgactacgtagggcaaaacctgggagtcatgggtgaggcctctgttacttcactatgccagggacagccaattgcggaggcccttcagaagccttccaacctctactcccttgcttgcatgtctggagcgccttcactggctcaggcactgctttctactgagtcctctgtgattctttgacctcccactagtcagtgttctccatccacaagagctacatctggtcccatgagatctccacgaaactgggtttatagagagttaatcgaataagtctcatctacagaaaggaagatattgtttaattattctctagtaacatacagctcttacaggcagtaggccaagtgtatagcttgtcaccaagaagcggaggagggagtcacagcttgcaggtggcttgttcatgtctctctgttccctagatctcagcaatgtattcctcagtgaataagcctggccagtcggcacacaaacctggaccatgtatgaaagggccagaatctgcctgccactccatgaagggcctccctcagaggtcgtcatcttcctgcaatgacctctatgccactgtgaaagactttgagaaaactcccaacagcatcagcacactgcccccggcaaggagacccagtgaggagccagagcctgactatgaagccatacagactctaaacagagaggatgagaaggtccctctggagaccaatggccaccatgtccccaaggagagtgactacgagagcattggggacttgcagcaatgcagagatgtcaccaggctctagcaactaaaagaggctgtgatcagcagctctgctgtggaaaggaggtggctgcagtttctcgctgctttggttgactgaaatcttcaagtgcagtctcccagttgtctcccagtttccaaaacagtaaggtacggacctgcctgccagggcagccaccctccagtgctcccaagaaacccctgggacccctcacctccacattccacagaggaaggccagctgtgggtgctggcggggaagccccacccaccaatgccaaaatcccactgcctgctgaagaagagccaggtttccatccttgctctctttccctctgctcctcatgctaaaacactggcacttcacccctggagacctcccatgtgtgcttcatcccaaggatggtctcccactggcctgcactggccttcagtaaatgttagcatggagagaaactggttgccgttaacccaccctcttcccagacctgcctcttagtccctgggaaggaacctggatgtgcaggctgtgaggtatggggtgggccgtccctggagtctctggggttcttgctcctcgttggacactgcatctgcagtcttcagaggttcatgaggtcagttgagatgttttttaatgttctatgttgaaaaccttcccaacagtgtttggattttcataactactgtggtacttctgtagctgttcacacccagtgctcttccttccaaacagagccttaatgtttctgtgaggatggcagccatggtgtctatccccaaagggctgcggacataaatgtgttcccggtggtctttgctgcccacatgtgactttcctataatctgatggtaatctgagtaaaatgtaaacatttattttattatataaatttataagatgttttatgtttaatgcctaatttctagaaagtgccagaaaatatatattaactatttggattttatgtacaacgatttatactctcattttacaaacgataccataaagcacataagctagataattataagcagtttttattcttttctctaatgagtaatatagcattgaagacttgttaaggctcaactcctcagacagtactgggagttctagatccaaaacactgaggcactggtggcaaaatgcaatggacataaatgtgtcactgctgagacactcggtgttataaatagaacaaaatctgacttgggaatcctgaaagtaccagactttcactgatgtctagtgacccctctaaagacagcagtggcggtgcccccgttcagtctctgccgacgcaaattgcccggttgttcatcgcttcacaggaatcagtagctgaagcagctcacattgaaagttcagtcatcgctctagatcttcccaggccagcattggaaactctgttcacttttcattttaagaggagcctcgctgaagtgcaggacacagataaagagacagccttttctttcctactgccatgtggcatcttattctaatgacttaagaatcatgctattttccttccctgtgataaagagtgtgcgtgggaaggtgacatgaccagctctgtggcctgtctttccatccttgtactcaccgactggttgtggatcatgcctgtggagctgcaaactctcttggatgttgttggcattagcctaatcctccatgaagatggtgggcacatggataagcatcgcctctgctggccccgccacagcggtgggataccccagggaactgggagcagtaatgggcaaggctgtttgcaaccactgattttcgctgctgtgtattaatgagtttggcccaaccatctctcaggccacgagggtcccctcatcacatgccactccccgtgccacagggcgctcctggacatgtgcttgccaccatgcaattccttacaggcatcgtatagctcaggagtttgattatgttttataaaaagtcttagcaggaaagctggtatgatctctaaagtataaaactctttttttctatgaatgcacgctttattattcatgtaccgtccagagacatcaaacccatcagccccctgccccaagaaggaagttgaaaaacattaacagtaaagagcctttgcccaagagtcagagatcctatgacctgccttctctgctttggtgcccagaagagagtgtgagactcttcaaggctcccagagcttcggggaatccagggtcattttgagaggactctggggttctgcccggtagtccctcttgatgcacagtggcagcagcacagtttccaattcgtgagggccttagacaaccgcttgagcttcatctcacgccccttcttgaagaaatagtacctgatgtctccttttgtcagtttgagtttgtcagccatggccgccagagtcccctccttagtctttctcaaagtgcttttttacttcctggaactgctcataggtgaacccagagtatccatcccagtcggacagaccccgagttgtctccatctcagctacttctatctcttctgcagctcacttgagttctgttcttcaagattccataaaactctttcttcagagataagttcattatagataatcatgtcatcttgaattcctgttgtccaaatgtcccagagtttccaaacgtggtatgtagcatggtcatgaagtgtgcactgacatccctctcctggtccgagaagctcgcagtggtaagagaacatgtgacgggcgatctcacaggttctgtacaaggaacctggagaccctctccccaacataaatccaaaggaatacgcactagcttgtgaggatacagattttagccaagtgaaagagcaaaagctcacagcaaaacaaaagcctggacaatcaagccaaagatgccagcacagcaggaaatgtgtggtaaccatgtacctgacgctcggctgagcaaagcgagcccctcaccagtcagtttgagttacttacttggctaaaatccatgttcctgtctttgagctggacggagcctgtagtttggtttaaagtctaaatgttacagagtttaaatatgtgggaaaccatcatcaaaaggaggctggactgtacactaaacacctctgagtctacagcaggctggactgtacactaaacaccaccacagagtatacagcggtgactatagactcaccacagactatcttatgtgaaacatttccaatattctaaaagaaagtcatttttataaatgtgttggctgcatatttttgacttgtccttatctaaatcacatcactaagtctgcaaaacttctaaataataccaatactctttgtgggaaaagggttttttgcgtcttttattatttttacattgtacctctaaatatttatgttttcttgttcttcaggttcttttatttaactaaaagatgtttgttcggatttttactctcagatggaaattggaagcataattgtgcttaaaaggcagcactaaagatcattccatttactattcagatagcccagtacaggctcccccttggattggcactgctattctgtaggactgctttggtttgggttgggttggtttggtttggtttggtttggtttggtttggtttggtttggtttggtttggtttggtttggtttaagatctaggaactgggcactgcagcccatgcctgttatcctataatgagggagagtgggaaagaaggacggttttacattcaaggctaacttgggctacaaggccagagcctattctaaacaaaatgttctggttatctcaaatcaccttatatgtgttgtaaaggttggtgacagtccctcctcagacttctatgttaacctggcacctgttcaatgttgctgttgtatttacatgccttgtgatttgtgggggagtttgaaatacaagcagataaatacactgttacaagtagaggctgtagttctcattccaacaagttccctcataaggatggttggttgtagcatgtccctaaggttcccagccagtttgaaggtactcctcttattcaagtagggtacaaaatagtccaagacacaaagcagttactaattatctctgctgataattgtaactatctgatcatctagttcatgaaagagtaaagaggttttgttcgatgtgaaaatgcttgaaccttggctttctatgttcaaaaatattcgcattagcctcggaatcttagggttcttccctgactctgatgcccttcaagaggcagaaggactagggtgtgaagtcagtgtttccttcccctcacttgcctgctcctgcacagatgacctactgccccttcatccatttgccgttgacctcgtccccatcatgagtgtctacacagctgtcacctctgtgccatatctacagcatgtccagcttctcttcagtaccgctcaccagcctaggtgggaccactgactgtgagtctgcagtggccaccgcccagtctctgtgtctcaagctccaagagacggtcacacactaacctgcaagccaaggctggtgactttgaccatccctaacgcatgagttttccatggaaacctggtcggtgaacctgacacgaaattcccaattcccctttactctgtactgtgtggctggtgctcttgttttcgttctctctctctctctctctctctctctctctctctctctctctctctctctctctcaagttgattcctccatgttgctttacagagacctgccaactacccaggaatgtaaaagcattcatagtatttgtctagtagagatgctgtatgaaaaatgccaaaaccaaaaagagaaagaaggaaagagagatagatagatgacatagatgacggatggatgggtgggtgggtggatggatggatggatggatggatggatggatggatgggtgcctagagagttgagtctggaactccaatcattctatgtatttttagtacattttttaaagtatcaaatacacaattgactctgaaggaagacaaaaatagcaaaatttgaactaagtgttgtgagtagctcctgcctgtccccacttcccacctgcccgtaaggtcatgtttctcaaccttcccaatgctgtgacccccccccccaaacaccaccatgttttattgccatttcataactgtaactttgctactgttatgaatcataatgtaaatgtctggtctgcaggatagagaacccaaaaggggtcttcacccacaggttgagtgccagtcttaacatgtaaacagtaaatgtaaaggattcacccacaggttgagtgctagtcttaacatgtaaacaataaatgtaaaggaagactatgaactcaaaggttaaactttttatttagatattttctttgtaactcaagagtaagccaagtttgaggaaaatttagtgaggtcattaaagttgtaaatctgtaagccagaagaagtagccctcccagtatattttttctaaagactttaaactgttttctctaggaagatcaactcctggaataaaagaacaaagctcccatagcctttccagcagagcatatatctgtctgccactacccaggtgtctgttcttgtcatagtgtttcaataatttatactggggggagggggaagtgcattttaaattttcttggaaaagtgaattaatgtgttaaattgtccagttttgtctaaagagaacgattcgttttggagacaagagcacagggctgtggtccctgtcccaccatcaagtttactgtgtgacctcaagcaaatgattgaacttctctgtgcctcagtttctccatattacaagatggggataatgattaccaaccattgcctacctcatagggatattttgggaacaagtcagataatgtaagacaaaggttttgatctccttaaaaggtgctgtataaactgcggttgcattgctaatgatccagcattgtgtttaggattagatgatagcaatactttttgtcacgttttagtcgaggcattatttctactcttctgtggccagatcacaaattttcattcaataatggtacttaaggaactgacacgggtgtttgttttctgtctctaatgctaatatgtcaattctgaacagtcataaaagggtggagttgaacttgtgatggcttctagttcacatggaacaaatcttattcaagctgtatattaaaagtataattacttgtaaatagcaggtacattgtaattaaagacacttattaacttgtctttgttctttttaaattgtaataaaggccagttttatataaaaacttgttaaaatttgtttgatatttggaaaggccagaaatggttcattctatgcttccacatagaaggatgctcagatcaactgccaacaatgagggttatggttagagccagatttctgacggaaaagcatcagtgcctgaatctgctccaggtgacctgtctgtgatgttggagattgcagtaccacctactgagaagtttgtcttaaaatgaagggttgggcatcacacctgtgctttgcagttgctaatagacttcacaggagcctgagcaactcagactagctttacccacctttccaggcaagcctagaaatgtctgctcagggccaagaggaaaggccacctctctgaggtgggaggctgagaggcaagggcttcactcagtgtgtagccttgagtgcttcactatccttccctaagactggccctagaaccaaaaggtgaaccggtgagggtttctttagccaaggaagtccagggtcattctacctgtgtaaaagctcagagctagggaacacttgtttgaattcttaaatcccaaaacacacctagaccacccagggaactggagtgtgtcacagctcagcaatttggtctgtgtcctgtctcctagggtacagagcagcctgtaggtctactagaagtctcctgccaatccccacacagagcagacattcatcaaaggaaaagagaaatctggcacctaattaaagtcaatggaaaacattccactcatactgtcatatatagatacgtgtgtgtgtgtgtgtgtgtgtgtgtatttcactgatataagtaatatctgcacacgtgaccagctctgattctgtgtgtttatgcagacctcagtgtgcatgaggactataaatcagaatcatgaggctggacttcagattgtgtggcaccaactgtggacttgtcatcacatctgtccctaagacacctccatctgttatgtcccaatgtcatctcagaatttcattcaggagcagaattctctctcccagctgtcccatttgccctttagaaacattttgggttgaaatagaactcctataacatagactaattcaaatgctgctaaatagatgtttaatctggctcccatgctcccacgttcccgtccccagctcactgagcctggcttggactatggagcctcaggattttgtccttgggatgttcctctctctaaagctgcttgctgaccatcagtctctgaggaaatggcaggggaccacaacagaaatatcctccaagtcacaccagccctaaaagtgccagcgaagtagggatggcagagcacctgccatggaaacagacagtctagccacctgacagcacagtcaacagaggtgtggcccaaacagaaagcttttctatgctcagacgaaaagggaaaaaagaaataatccttgtaatatcaaagtgagggaggcaacagaaaccacaggaaagacacggaactctatgtctatgctacaggagccaactgaaggctagtgagtcaatggctagtctcacagcctttgaacctacttttaaatatttggcatgcacagtgtctcatccccatggtagataacagtctcagaagatctctgcgagtaggttagagctcgtgtgagagcacacagggaatccagcaaaagagcaagccaggtgtgaagcagtgtcaatgccagggctccacactaggccatctgtgactccaacagcagtcagtggcctccttgccaggtcccctgatgtctccctctctagtccagccccatcctattcagacagccttccacagtgtcaccagaattatcttccaagaagcaatcctgctgatgtcaggagaaagaggacagatttactcaataaggccaatgtgaaggccctactgttttccagatgtggttccagacaccaaggtcacagttccaccagaggtggcctctgtatgttgatacagtacatgttaagcaaagggaagtggactctgatactaagtaagagtggcagacacagtctacccatagtcagtttttaaggaaagatatccaaaatgtacctttctgcatcggcaaataaaatctgtatgcagacagacgacagttctgttcgacgctgctcatgtcctaagcatcattgaatgatgctgagtaaataaagaatgatttgtctagatcctaagtgagatacacaactcaggagaatgagggggaacgggaagaagaaatggggcttttcccgttgggtgggggggaggggctcatgagtcagtggaactcatattacaggcctcaaattacatgacacagttctgtgaacagaagaaaaagtctgaaagaaaataagatagaaatacaaaggagcctagaagaaagagactggtgtgcatgggctctcaaaggaactagatgatagagtttaaaaagaaaaatctagaaggaagcagagagcagagccatgatgaggagaaatgaaacagatgctgtgggaacatttacatcaggtctgcaacaactgtctttcaaaaaatgacatagactggatctgcagctaaatggaaacatttcagcgatgatcgcagcaactggggagatatagctcagtccgcaaagtgcttgcccaatcccaagatctagggtctcagtcagattgctgaacacagaatttttgaaggaggaagaaagctagttagggtagcacacactcgtcatttcagcaccgacggagaggagacagctctcagggtgccgtgcaccttactggaggcttccaggggagcgagaaatcttatctcaaaaaagggggtgaccctgcataaggaataacaccggagattaacatgtctcactactgcagtggtttaacaagaatggccactgtaggctcttgtgtttgaatgcttgctcatcagcggcactgcttaagaaggaatagggggtgtggcctgttggaggatgtatgtcaccacgggtgggctttgaggtttcaaaagcccaagccaagcccagtgtctcttacttttcctgctgcctgtggatcctgctgaatttacaggtatgagccaccatgcctggcttgtttgaactttggaactaactaactctctctctctctctctctctctctctctctcctgtgtgtgtgtgtgtgtgtgtgtgtgtgtgtgtgtgtgtgtgtgtgtgtatgtgtatataccaataccaaagcaactcttataaaggaagccatttcactgtggctggcttatagttcagagacttagtccattcttaggagggcagggagcatggcaacatgcaagcagatatggtgctggcaaaggatctgagagttctacatcttgatccacaggcagcagaagtgaattgacttgagcttctgagacctcaaaccccttaggcatgaacttcctcaatcaaagccacaccactccgagtgattggctcaatactgactgacaaatagctgaggaaggaaaatgaaggtaagacttccaggcagacatggggactgtggagagcagaatccgggcgggatgattcaccagcgagacagggaggatcagacattgacagcaagagagaggtaatgaggaacagatgtggactagaatacacgggtaagttagatgagctagctgggaggtagcttaagctaagacctgagttgtaataataataagttattgtgtctttatttggtggctgatgggtccaagaaggtcctgcaatagtgcctgttgtgactggtacctgtaatccccacatctaaggggctgatgttggaggatttcaagaccactgtgctacctggcaagtcaaataagcatgtacatgtgcaaaagtagccacatttctgaggacagtgagatgtgttctgttctctgtcgtgcatgcagcgggagctgggtatatggttgcagcaaatgatgtgtgaacaggacagcagtggacgtgtgtgctaacagtgcccccaggctgatggaatgtgcagacactagggcagatcccgggctgatggaatgtgctgtggacgtgtgtgctaacagccccctgggctgatgggatgtgcggacactagggcagatcccaggctgaggggatgtgcggacactagggcagatcccagactgatgggatgttcgggcactagggcagatcccgggctgatgggatgtgcggacactagggcagatcccgggctgatgggatgtgcggacactagggcagatcgtctggcaggtgcttcctgagctccagtggacaacatgggcgtttgcaaggaggtgaggggaccagagacaggggaaatacttaagatgatgaactaggcttgatctggtggtaggaataagaaagaaaaaagatgcaaaaattggtcttagaatagaagggatcctatacctgacacaatgccgatgatttgttttggttttgtttggggattgtttgtttgttggttcagacatgtgtgggctccttggtggtgttgcggtccaggaactcctcacaaatcacaggaacaccgatctcagtcggacaggagtagttcattgaggatgccccaggactgcagtgaagactcggggctgaacttccatcctctgtcaagatcctgtgcagctttttaaccctgaaatctacaaacacctggctcaagttattccacccgtcaggaattagggataggggatgtcttaggagcatgtcttttt

SEQ ID NO: 440 - DNA, 2666 bp, Mus musculus
agagggagacacgcacccggagctccgagcacagctctcaagggctggcggccacgacggcgtttgctcgggttcccggtgcagtccgagtctctgcggccgcccggtgcgcccgggagagcgcacctcccccggcacggcagaaccgaggcgacgaggatcaggagggtcctgcgcccgctaccactgcccaccgcgggccagcccggctgcgagcagcggagttgcagcgctttttagcgctctggagccccagaagacctctgcgaaccagccaagaaggaagagagaaccccagcatactgacacgtgaacgaaaccctcttctggacaaccgtttctccaaggtaattgtggccgtcataggaagaagggagggaacacatgccttgcagtttcagacgacagtgggagcatggagagttgatgctcccaccatgggccctgcaggaagcgtactgagcagtgggcagatgcagatgcagatggtcctgtggggaagtctggctgccgtggccatgttcttcctcatcaccttcctcgtcctcctgtgttccacttgcgacagagagaagaagccacggcagcatagcggggaccatgagaacctgatgaatgtgccttccgacaaggacatgttcagccattcggcaaccagcctgacaacagatgcactggctagcagcgaacagaacggggtgctcaccaatggcgacattctttcagaagacagcacgctgacctgcatgcagcactatgaggaagtccagacctcggcttccgatctcctggactcccaggacagcacaggaaaggccaagtgccaccagagccgggagctgcccaggatcccgcctgagaacgccgtggacgagattctcacagccagggctgcagacacggaactggggcccggagtggaggggccctacgaggtgctcaaggacagctcctcccaggagaacatggtggaggactgtctgtatgaaacagtgaaggagatcaaggaagtggcagacaaaggccagggtggcaagtccaagtccacttctgccttgaaggagcttcagggggctcccatggagggcaaggccgactttgctgaatatgcctctgtggacagaaacaaaaagtgccgccacagcgcgaacgcagagagcattctgggaacttgcagtgacctggacgaggaaagcccacctcctgtcccggttaagcttctggatgagaatgccaaccttccccaggagggaggaggacaggcagaggagcaagctgcagaagggaccggtggacacagcaagatctcagcaatgtattcctcagtgaataagcctggccagtcggcacacaaacctggaccatgtatgaaagggccagaatctgcctgccactccatgaagggcctccctcagaggtcgtcatcttcctgcaatgacctctatgccactgtgaaagactttgagaaaactcccaacagcatcagcacactgcccccggcaaggagacccagtgaggagccagagcctgactatgaagccatacagactctaaacagagaggatgagaaggtccctctggagaccaatggccaccatgtccccaaggagagtgactacgagagcattggggacttgcagcaatgcagagatgtcaccaggctctagcaactaaaagaggctgtgatcagcagctctgctgtggaaaggaggtggctgcagtttctcgctgctttggttgactgaaatcttcaagtgcagtctcccagttgtctcccagtttccaaaacagtaaggtacggacctgcctgccagggcagccaccctccagtgctcccaagaaacccctgggacccctcacctccacattccacagaggaaggccagctgtgggtgctggcggggaagccccacccaccaatgccaaaatcccactgcctgctgaagaagagccaggtttccatccttgctctctttccctctgctcctcatgctaaaacactggcacttcacccctggagacctcccatgtgtgcttcatcccaaggatggtctcccactggcctgcactggccttcagtaaatgttagcatggagagaaactggttgccgttaacccaccctcttcccagacctgcctcttagtccctgggaaggaacctggatgtgcaggctgtgaggtatggggtgggccgtccctggagtctctggggttcttgctcctcgttggacactgcatctgcagtcttcagaggttcatgaggtcagttgagatgttttttaatgttctatgttgaaaaccttcccaacagtgtttggattttcataactactgtggtacttctgtagctgttcacacccagtgctcttccttccaaacagagccttaatgtttctgtgaggatggcagccatggtgtctatccccaaagggctgcggacataaatgtgttcccggtggtctttgctgcccacatgtgactttcctataatctgatggtaatctgagtaaaatgtaaacatttattttattatataaatttataagatgttttatgtttaatgcctaatttctagaaagtgccagaaaatatatattaactatttggattttatgtacaacgatttatactctcattttacaaacgataccataaagcacataagc

SEQ ID NO: 441 - protein, 552 aa, Mus musculus
RETRTRSSEHSSQGLAATTAFARVPGAVRVSAAARCARESAPPPARQNRGDEDQEGPAPATTAHRGPARLRAAELQRFLALWSPRRPLRTSQEGRENPSILTRERNPLLDNRFSKVIVAVIGRREGTHALQFQTTVGAWRVDAPTMGPAGSVLSSGQMQMQMVLWGSLAAVAMFFLITFLVLLCSTCDREKKPRQHSGDHENLMNVPSDKDMFSHSATSLTTDASSEQNGVLTNGDILSEDSTLTCMQHYEEVQTSASDLLDSQDSTGKAKCHQSRELPRIPPENAVDEILTARAADTELGPGVEGPYEVLKDSSSQENMVEDCLYETVKEIKEVADKGQGGKSKSTSALKELQGAPMEGKADFAEYASVDRNKKCRHSANAESILGTCSDLDEESPPPVPVKLLDENANLPQEGGGQAEEQAAEGTGGHSKISAMYSSVNKPGQSAHKPGPCMKGPESACHSMKGLPQRSSSSCNDLYATVKDFEKTPNSISTLPPARRPSEEPEPDYEAIQTLNREDEKVPLETNGHHVPKESDYESIGDLQQCRDVTRL

SEQ ID NO: 442 - DNA, 37004 bp, Homo sapiens
tatacatctagcagctcttctagaacagtgcttctcaaacttcagagtgcgtcacgatcacctgcagggcttgttaatacagaggttgccgggccccgccacccccgagtgtctgagtcataagtctgggggaaggttcagaattctgcatttcaacaagttcccaggtgctgctaactgggaccacccttggggaagttccattctacaagaaccatgaccctgtcccttcctctacaaggggcctaggagtcacaccccttgagtcatctgccttccctgccctctccaggcagaaagctgtgaggataagctctggacatatatttttaaatacaagttctgactttctctaatcaagctagtctctcttgaaacatttccccagccctaagtaattcacaataacaccagtaaataacttggagggatgtgtgttttgaggattttggttctatttttatgaatcaagaaatattttgcctggctattaatatttttaaaacttcataaagatagccattatttaagtactgcgtaatgatttcagccacatttttgccattgctgggtacaatattagcactgttaagccagcagtccttacgatggcagtacatctaatggtgtgggagagaccacaggacgcgttctctaatttggcactagctcacagtgaactggtgttacaaactcctctgttgacattcctttgacatatgaaatgaccatctgctcttaaattctacttctccagtcttgagggtttacttttcccagatcaagcatcttttactgtgcagtcccagtgaggtagtagctgtctgccgaaagggggcatttgtagttagcccaggctaaacaagtgctaaaaggaagtggatcttttcaatatcatgagccacgagtaggaaatttgattgagaggcatttgtgtcaagtggtacatttttgaacctcttggcaaagaaactgaagtttatttttttttaagtcttttattatgaaaaaaaaaaaggtggctgaattactgccctcagaagccaaataaaaacagtgcaaagcaatgcttaacagagcgtgactgcaaatagtgctggtctcagtaaactggcctgcctgtagacaccacatccatcacagcaaagctggtgggatgtttgtaaagccctccagataccttggaaggaggtttatgattaatgcatggctgggagtaagcagtgggtgtaccagatgggagtgaacattcttctctctggccctaaaacaagtcctgatagagtgaagttaagattgccagggagatgggtgtggctctcacatcctcacctgtctgctgctgtcccagacaggccagacgcctggaggttgtgaatacctggggctgagagcatgctgggcagtgtgttagaagaggaagtgctggggacagagcctgtagctgcatgaccctaaataaggcactgaactttgagcctcagtttcctcatccatagaatcgattcaataacatctaccgcaaagggtcatgaggacgaaataaaataacccacagtaaagtagctggcagacacacagtctgtgctcacttccatttttcggtgctttttatgtcaagcctatgagtcaaaactggtatgtagcgagcctcttgggggccctggagggaacttgggtaaagccacagtaatggattatatgcaagcaggagcaccatggagaccaacctaccctggccaggtggtcgggcaagcaggcttttgtaggttccttgtgcccccatcaagtttcagcatcacttgagaggacagagcaaaagggtttcttccaactcttaccacctttgaagatctgaccaatatgcacttcctcttgcctccttttcttcctcttaactattaattcatccaataaatattaagtgcctactgtgtgccacacactacggctacagttatgaaccagataggtcagtttgaagttcctccctcctggggcttagcccagcagaggagacacttgaattgcttcataatttcaattttgagtaaggaaggaaaaaacttgtaaaagatgggcctcagccacacctgagaggtgggagggttttggcatcaggaaagctgccccaaggaagtgagactcataggatgcttagatttgtcagatgaaaaatgttggaaagagagccaacaatgtttaaggctcctttttcctttagaaatggaaggtccagcccccttgaggcttgtgtgaggaacctaggagctggagaaggtgtgaaattgtcattgcagagaggggtcagaagaacactaagcttggggacatggtgagattactggagttgacaggcctgctgcgggggatgaagacactgatattacggtgctgtgacttttctcaggagatgttcagctgcttcagtgacaatacagagaagccagatggctgtgttcattccagagtgaaggatttgccttaaggccaggtgcggtggctcatgcctataatcccagcattttgggaggcctaggctggcagatcacttgagatcaggagttcaagaccagcctggccaacgtggtgaaaccccatctctactaaaattacaaaaaaattaccaggcgtggtggcacatacctgtagtcccagctactcaggaggctgaggcagggaatcacttaaacccaggagtccttacaatcgattcagtaacatctaccttaaagggtcatgagccgagatcacgccactgcactccagcctgggcgacagaggaagatgctgtctcaaaaaaaaaggatttgccttaagacactcttagcttattttttaattgtttgcttagtgcgctcatccctattactctccttcccttccttgtggtataaattatgaattaaacttgcattttgagaatctgcttgagaatctactcaccattcttcctacagaaacatgtattcaataaaaattcctgactggctcctatttcccaggtcatagaggtgctaggaatatggtgggaagtgaggtggagacatccctgccctcaaggaaattagattggatgagccaacatgcaaggcaggaagaaatagaacctaaagcccaaaatacacactgtctgaaacattccatgaagccttcttgtgcaaagtgaatccccattacccgtgctccttatgcagtcagtgtagaacgtaccgcattagcccaaatagaagcgcatctcagggttctgtcagagtgcatgtgatacgtacttctagaaagaccatgcccttgcactctgcctccctccctctctcgtgtctctctctgtctctctctcttcaccattaaaaatgaaccttgagaattggcttccaagtcagaatttgggggaaaccaaccttagaagtgattccttacccatcaaattcacttgccttttggcttgtctggggcaaaagtgtttataaacaataaactatattatttctgtgatgtaagtttaatgtattattgaagacaagtgacagccccacatacccctccaccaaaagggtcagctttcctgttttctgtgcagatcgataggtttggtgtgtacaaaaagtgaccaggttatgctgacagacagccatgaggatttataacttgcttttaggatgagtgccggtctctctcccatgagcagtgagtcctgatagcagggtcactgtggtctggtgatgttaaggcattccaggtttctttcatctacactcattcttaaactgctgcagaaagagatgtcaagatatcactgggtggggacattagaaaaggattcaggaatctataaacaagaaaagcttaccttccaccaccctctgtgctttgggtgtgttctgcccctgactcagtgcaggatcagaatagggcgatcttgataacaatcatgtgtaggcaaaagcctttgtaccttagcaggatggaatagtaaatatctgggtaggtgattccccatgtgtttccaacagacactcatccgtgcagagttcagtgtggcaggcttttctgtagcacagtccctgtaacctgaacggaagactacctgaatttgcacactttagcttaaaactctttctggggcttgaggattctgttcagagtttatttcatcttagcctgtgcagctgtcagtgtgctcacaggaccagggaacccaccaaagaatctgcttcctccgccatcattaaatctggttaatttagagcccataaagtgtcattttaccacatggttcccacgcctggtaatgaccaggaaggaagaattcccactgggattgggcccttgaccatatttcatccaacagtgaggggtcatgagtggaggtggtttctatcatgtttaattatgtgtcaactgcaacagctgtaaaaaggtaatgactatcattactgacctagacctgcttcaaaagaactctaaagtgtctgtttccatatctaatctcactggccatcccatctctaccaaattattatttatagaatttgctatgatcagagaacctacctgttaaggatgtttggccaaagaaataaatagctgccatttggtctgcacctttcattaatttgtgtggttttttttttctcctgttggaattgattttggtggctgatagtgcaggctaatgaagacaattcaaatgccaagcataaggcaccaacaataattgagcagctttccttaaagaaagtgctgcatagggctgagaacagaattatgctgccaccttgtggttaaaagtgacacctgctggccggtcatggtggttcacgcctgtaatcccagcactttgggaggccgaggcaggtggatcaccaagtcaagaggtggagaccatcctggccaacatggtgaaaccccgtctctactaaaaatacaaaaattagctgggcatggtggcgcgcgcctgaagtcccagctactcaggaggccgaggcaggagaattgcttgaacccaggaagcgaaggttgcagtgagctgagatagcaccactgcactccagcctagcgacagagcgagactttgtctcaaaaaaaaaaaaaaaaaaggacacctgctgttaaatttaaaggccagtggtttttctagtgattaaatcacttatgcattaaaacaaattagtggatataaaagggtaagagagtatggaccttttagtccaaaataattaatgagataaatctttgaaagaatccccaatgaaagtcctttaaccataagcactgacctttctcaaggctaaacaacaagttctcacagtagttcgaaattatacaaaattggggtggagattgaggtagtaccactgagtcttttacagcaatactatatgcttgtattatattacagtctccagccatgactttacatcaatgcagccaataatgaagcctattttatagcaaacagaattaatgtacaactattaatctaaatctgtgatcacattaatattaccatcttctgtggctcatcttagtacagcattcaggtgccaaaattaagtgttagtagagttaacaattaaaataaatggtccttctttgccctgtgttgaataactcaaagaatatttacacatgtggtctgataagagaaattttttaaactttgaagaaataggctgggtgtggtggctcatgcctgtaactccagcactttgggaggccgaggtgggaggagttcaataccggcctggcaacatagcaagacctcatctctactgaaaatcaaaaaagttatcctggtatggtggcgcatgcctgtgttcccagctactcaagaggcagcggtgggagcattgcttgattccaggaggtcgaggctgcagtaatcacagcactgcactccagcctaggtgacagagcaagaccctgtctcaaaaaaaagaagaaataatattctatgtaatattatatagttgaatgcaagtttattgagtcaagtaagaacaggattcggagaaatagacttaaatgtcttcatgaaaaaaacataggggatgctcctccaaatggctcagatatttctgctggaagagatcatccctgatagtcaagacataacttacttgatattgaatcagcctaaaataagatggtccttgtggaccataaccatgtcacaggacagcactgccttgggtggcacagtgtagagtctggaaatgccatgattgtcacaggacagcactgccttgggtggcacagtgtagagtctggaaatgccatgattgccacagggaccttcctgttcagggtagcttttactatccatacactatgcctcctatccgcttactgtctcccccatcactcatcctaagaaaagcctcgctggccatctgaaagggtactgatttccctccaccttcccctcactcaaaagaacagaacgaggacccccaagcactgcatttaagggcagttaaaccgacacatgagggtccagcctaggggcagagcactgggccctctgcatgaggcctctaccctcagctgctccaagaaggtgaaacacaaagtgatccatgtacatctgcacacatggggaggggccatccccatgcacaggggaggagccggtccaccgacacacatttaccaggaagtccatctagacctgtgagcaggagggtgagcgggaggcagtcttggctcagttgtagatgagctgccaaaatttaaggagatagccagagaaggcatgggcagcagaattttggaaacaaacatccagaaaaaagagagagagaccaggagagaagggtagcagtgcacagatcttctccaaaatgggaaccgtccaccaaggacgtctgctgtaaggatcaaagattatgttagtctagatcccctcagccaccactcctcccacctccccaccaccaacactcacacactctgccaggcccctaaagaagagtaggtggcagttgctggtgcagccactcaacccgccagcactgcccacgaccacggggactggtgtcccacagtcctcctgcagagcagcacttagagggtccaagaggagaaagctgcccccgcaactggggcctttgtccctgaggactgcagtgcatctgactcagaaacgtgcacctgatgatgatcattctgttcgctgtgagaattttgtccacagtaagaacttgggaaaaagtctttcagtggctttatagacaattctaattgaaggggagtgagccaggagtttcaacacattttctcttggttccatcctttattccacagcttgtaataatcccctttcatcctctttctccctgcactgtactaataggctgggcatcccacatctctcatcatattctactgacctccttctattaggagagaggagagagagaagagaaacatgtacagaaaggagagagttgttggcgattccacactaggtttcatgaatggatatctggcttttgaataactcacacagcaaactctttttaagaacatggcattttataaatgggcatcaattaatctgttgtatgaatgaatgaagaacaaacagatgcctgcacaggagatagataccttttgtctgtgattcctaaaatgttgtatgctttggacctgtgtataaaaatgtattttatatattttcattggtcatcatgatttagctgcttgcttgaatgtattttaaaacctattgtggtgccaatttgtagtctcagtttaaagtgaattattctttgcatcaacaaatcacagaagtggtggttattttcatttgtttatagctgtctgggggcaaacatgcaaagtaatttgacttgttattactgtacgcctgtcgtgtttacaggcacaatatacatacaatcaaacataggaagaaagaagttctgtattacgcagggagtcctgcatttatataattatagagccttagaagacgttcatgttgattcaaagattgaggaaaacaacttcatctctcagaactctctctgcatacattgtaggtaaaagtctctttttcttcagctttttaatattctttaactttgaatattcaaataaatgtgacagtgtttcacctggagatgatttggtccaattgaaccacatttgccaaaatggcttttattctccccgttttaggaggcaccctggtttgctgcgaagccacccctgccgtcttgatgtctgtgctcagggatggctgaaaacagtcacagctttatcactgaagcaaacgaaaatgtaaatactttttcaaagaagatattgcactattatcaaaaaaccaaagtatttgcttattcatgacacttgagaccaacttaaaggctatttcttttcatttagaatgttctagaattgagcaaagcaaatattctttaaacaaggcctctgtgatgacagatcatttgatatacgactccatttttaaaatatctgtagctcttaaaatatttcacacaaggaatctgaccatttctgtttcgaagtattgggacagggtgcagtgaccctgtgagtcccagcatccccacagtgacaacgagctttccttgatggacacagagcacaggctttggagtctgagacagctggactcatccctccctgccacttagctcctgtgacactcaggggaagtcaccgctctgctgggatttagcttccatctctgtaaaagggggattaacagtgcctcctacacagggtggtgacagcaattaaatgaggaaagcatttagcagaatccctggtacataccaggtacggaaatgtactaggtagagctcttatgcttctcttgcaattgtttataaataggtcttatttattcccagggatgtattcttagcacatacttcattcattcatttgaaaatgcatttattgggtactcacagcagggtagtgtaaacatactcagaatacataacatactcagaataaataaatgcaggtgaatataaagacattctatttcattagttacattgaccttaaaccttctcagacaacagtgggtgagggagatgagagatggcagtgggtagggagatgagagatggcagtggattagggagattagagatggcagtgggttagggagatgagagatggcagtggggggcaggggcaggtgatgagttgcatttttgcaaaagctatataagaattgttatatactgttctgattttttttaatgaacctaaatgagcatggatttatttgctatggagtacttgaaatctttatttgaagacattaagaatccatccaggccaggtgcagtggcacactgtaatcccagcactttgggaggctgaggcaggaggattacttgagcccaggagtccaagaccagtgtaggcaatatggtgagacttcgtctctacaaaaaataaaaatattagccaggaatggtggcgcatgcctgtagtcccagcagtggggggcaggggggtggttcaggagaggattgcttgagcccagggaggtcaaggctgcagtgatccatgattgcgcccctgtactctgggcaacagagcaagaccctggttgaagaaaaaaaaaaaaaaaaaagaacaagaagaatccacccccaaacatatcaagataagacatccattgcttcaaacactgggccaggcagctgtatgttcccgctttcgttttcaggtaagaaaaatgaagacctagaccatggaggggacttgcccagagtccaatttcaagtccagtccggggctctcctcagcatccagcacacgcttccctgactttgcgcaaaggtcttgctcctgacagggaccgaattacagattctgccactttacccgagaattactctccaaacgcactggtctctttgcaggacacagctctctgcctccatgtcaccacctttgaaggactgactgattccctcggctggtgccagtgcctgctcctgccatggggcccgcggggagcctgctgggcagcggacagatgcagatcaccctgtggggaagtctggctgctgtcgccattttcttcgtcatcaccttcctcatcttcctgtgctctagttgtgacaggtgagaaccagagtgtatatacctgtgccttaaactaatacatcccctgtacccagaagagtttctgtggaaagcctgttaggaatggaatcccgccacagagccgtcccagaaacttgtgcattagctttaactctcttctctctgctgcagagcgtctcgggacattctttattcactgaaggaaaacccatatttggttttgctagggagcaactagaagagcccttatattttaaacttcccagaatgaaagtcttgctgttctttcgatcacacccttgtcaaaatggattttgtcttttttcatgtgcgggcattttgaaatcttgtgtgatgcgcatctttttgccaccaccctgcggaagtcacagaatgtttgctgctacgtgatttcggagggattgtttatgattaaaaatgtgtagtgtagaccttcagtttctcaagaaacagattattttccaaggagaggaacatgctgtatatgaaataatcatcagtgtcctttttttagagttatacttctctctctcctctgtctcatataaaatgtcagtacccccaacaagagaaatctttgctcagagagaagttctttctaaccagaagtgatgtttcaggacattctggaactgttacaaagcacataaccttctgataggctagatgccaccagaggcccatgcagaccagctgaccgtcagccagccctgtccaaactctccctccaccatggaagcaactccaggagcgtcacttaaaattctgaaatagcttcctaccctaaaatctgtcaggaggagaaaagccaagaccctctgaacccagctagcctcctaatccctgcccagcctggacccagacctctgtggctgggacagagtctgaatgattgggaagatgaacaaagaggccgcagggccggggcttcccggggcctggacggcctgcttctgtagttactcatgttcccactaggtgtcacccttgttttatagagaacgtggatgggcggcgtattctctacaactgatggctttctttagactgtcccgagtaaaaacaaattctatttttacttgacagactttcccatagactggaagtacatatgactcaccctgagagcatgtacccttcctggcgtgccaaaaatctgtattttctccatcccactgcagtgtgtgactttgcagagactcagataattgtcttcattttctcaaaaaaaaaaaaaaaaaggtataacttactctgctagtttaggtataaacaatttctacgcaggcccaggcctcggtcctctccttgtgaacttgtatgttttttcccggaagaaggggtgccaggggaggtggacagtccctagttgaggcttgaactcctcttccccagcacctgcaaacgggccatcaaatcactgtctgattttgtctttgttgacaaaataaacatggttcttaaaacgagagatttaaaagctgataagaattgggataggaaagggtagtgtgcgcttgattttaagggggcacatttgacattacaacatttcacttttcatttcagggaaaagaagccgcgacagcatagtggggaccatgagaacctgatgaacgtggtgagcctgcgcgtgtcgtctgcctgtctgtccgtgcgtgctccagaacatcagctacttatctaagtgtgctcccatgtgctcacagcctgagtagaacccacggggagagctaagcctaagttaaacggtggcttctgaaatggatgcagtagtgctgctgccggaatgatccttaaatggctccaacctactgcagggatgggacttttttgcctctattaatttgctagtgctgtcataacaaaggaccgcaaacagggtggcttaaataacaagtttgtttctcagttctagaggccagaaatccaaaaatcaaggtgttggcaggattggttgcttctgagggaaagtctgttctaggcctctcctggggcttctggtggtttgcagccaaactttgggtgtgacttggtttgtacaggcatcaccccaaattctgccttcatcttcctatggtgacctctgtgtttcacatcacctcccatctatgtatggctggctgtgtccaagtttccccattttataaagacaccagacatattggactagtgcccaccctactgtagcacgacctcatattaactagcttcgtctgcaatgaccctatttccaaatgagaccatattctcaggtgctgggggttaggacttggacatgaattttggagagacacagttcaacccataacaacaggtcattaagctggagggagcttgggacccacaacaccctaggtatataacctagccttgctggcgttttcccagccctcagtatcttacagggtcctgatgatcctgaggccctcagggatccaccctggcgaggaacagcctgagagtgtccaggtccttccttgtcctctctgacccaggcccgtgcttttgaatggctgagcagtcccagccgctggggagggggcccatcgtcacattagcaaggcagagttcagaatctgccctgagtcctgtggcagtgctaagacagaagatgcttcttgttcaggacatcatttctcaaggtcaagcaaaaactggttgggaggagagggtgcaaacaaggaagcatggatgagccaaggtctggcgtaaaacccgcagccagcagacgtttgcagagatgaccaggggcatctccagtctaggcttcctgacctgccaattctcaggactcctctggcccaagcaggcaggaagttgtcaggactccccgttcctcctgggacccccaggattttccttccctcccctctgcatccacatgcccacctcacccttcgcagctttcctgggccctcatcaccactcctccctttactctgtttctcgccctgttcccatccctggttgtccacattgtcgccacttctcatctgttcccagcgcccctgctctgcctggtgattgctgctgtggtggcctcagcagggagggtgggagggatggagggaacgccccactgtcgcttctccccatgcagactccaggcccctgcctttcgtcactccaccattctcctggtgccagttgggtggtgaggtggggctggggaagggctcccaccgccattcctcacttccttctagagcaggggttcttctgcagtgtggcctggacctccacccacagcagcagcagcacctgggagctccttagaaatgcgaattttcctgggggtgaggcccagtaaaaggctcgcaagcaccccaggtgatccagttgtatgctcgagtgtgagagccactggcctagagcttgggttcccgctgttctactcaaggtcagcagcagccctgggcgagataggaagagagtggcaggtggataaaaggaaaaagctggcttccatcccctgccttcttcctcatccaccatataattcattattgccccaacccatagcctcatttatatggatgtgaatgtctgtgagagagcgcgagcacacacaggaacgcatgcttacccggacactggcacccatgtacacacgctcgcccacccagctctccttaagagcttttcagctcctagatcttatacaacttgcggattcttcatctcatagaagcaaagattaggaatagtagttagagtctagattatggtaacttcagctgtgatcgattatgctgttatgggcccacctgggagtcttccttccccacacccatgcctgcccatttataacatcatttctgggatattagcacctgcattgcaagttcctggcaacctaacacagtgacccatctcactgggggctcatcagacgtgaatgagctgcattggatggaaacagctgacttccaatacacttttggatcattgcacagcatgaactatctgctgtgtattactggcttccaatcaagagtcagagaatttgtgaggccaactagcaaaggtttgtgtgctgtttacatcacaactttccttgtagaatcctggagcatgagatagcctcttggaacgtgcaggctgtgagaagaacagggagcaaatcacatttgcagtgatttgggctgcaacctgagacaagttgggtatttaaagaaatacatgaacaccaacttgctttctgactactcttagctatagctgagccaggcatattgttctaggtagcatctacacattctatccctgcagaaaaccaactattgatgccattcttccctccaaatgtcctaagtttatttgtaagaataagaaagatttgcagagctgggcacagtggctcacgcctgtaatcccagcactttgggaggctggggtgggcatatcgcttgaggccaggagttcgagaccagcctgagcaacatagcaagatcccatctcttatgggagcagccagacatagtggtgcatacctgtagtcccaccgattccagaggctgaggcaggaggatctcttgggcccaggagtttgagacttcagtgagctataatcatgctactgcactccagcctgggcaacaaggtgagacctcatcttaaaaaataaataaataaataaataaaaagtttgcagagctaattttcagcatattattgtttctgtgaacctagcagccagaggctttgctggttctaaaatagtttcagaaatcaatagccttatctatctctgaccagatttaagtctgttcccttcacatgacaaagggtgatgcctttccacgtttctcatagcatggcacacctttaccaataatgatttacagcacctgtgttgtaaggatgaggctgctgtggtctttttcaaccagttcccttcctgccttgagctaagggaattgatatctcacaacctgcctatagccctgtgtaggtcaccaggcaggaagctctgcacatggctttggaagattcccagtgcccctaagattctgggacaacagtgtctaatagaactttctgcagtgctggaagtgttctgtatctcctattggatatggtatccactggccacatgtggctattgagcgcttgaaatgtgactagtcaacaaggaactcaatttagtgtattttattttacttaatttaaatctaaaaacagtagctccccttaatctgtagttttgatttctgcagtttcagttacccacagtcaaccacaatccaaaaataggtgagaaccatacaagatattttgagagaaaggaagagcacattcacataactttcattatattatattgttttattgtcagtggttattgttaaattactgtacttataaattaaacatcatcataggtataacatatatggataggaaaagacatagtctatatagggttcagtactactcatggttttaggcatccactgggggtcttgaaatgtaccctctgtagataaggggggactattataggagattctgttttctgtttctgctgttttaattttttgaaaaagccatggatcttctcctctgctctgcagtccagattcttagcaatgtgatgcatttgtttttgtttttgtttttgttttcagccttcagacaaggagatgttcagccgttcagttactagcctggcaacagatgctcctgccagcagtgagcagaatggggcactcaccaatggggacagtaagttctgcaaaaacaccagctttccacacaggcctcatcacctctggaagtcctaggtttcaaaatacatagctcaaaaagtaggaaatgtgttattgctcagttttagtattcctagcagttttagcagaacccctcatttggatgaatactgctacttattaatccacttctgtgtgccaggcattgttctaagactggtacatgtactaattcatttgctcttttagtacattttagtacatttacatgtactaattcatttaccccacgagattactgttattaataataacactactctgtaagataggtattattactcctcacaatttaaaggtgacaaaactgggcacattgctgctgtaacaatattaccacaaacctcatgccttaaaataacaatttattgacttgcaattctgaggtcaggagtctgaaatgggtctcactgggctaaaatcagggcatccgtaggcctgtggtccttcctgaagcctcaaggagaatccattggcctctccctcattcttcacatccctctctgaccctcccccctccctattcacttatagggacccttgtgattacactgggcccacctggataatccaggcttccctctcatccgggagtcatctaattaacagccttaattccacctgtagccctaatccctccataccctccacaaaacattacacattcacaagttccaggaattaggagacagacatttttcagggtcgttctgccttccacagagatgttgctaatttgcctgatatcatatagtcagcgggctaaggatctgtagttggaaccaggcagtctgatccctgggcacgcactcagtcactctgcataacctctgcatcatgcattgtgtactcttgctgatggaaggagcagctaggtttccttcatgctttagagtttacaccatgcttttacctgaggtaagagggcgtcctgttacccctgtttactgatgaggaaactgtggggtaatcaggacaccagtgcctgttctctgtctaccatgatgtagacaactagaaccagagagcaaaagttcaccccctccgtgatgatcagggatttagaacacacaggggtgttggtaagttcagaaggattgggggatccgttgtcattttttcacataccccttggaaacactatttctaattcccccagagtgagacactaatggaataacttgcttactttgtgtctgcatcctaagggcagggctttctgtttcattgaatgatgtgtctgcagcaccctgcaccatccctggtgcatggcaggcactcacaacacggttgacaaagggacgactgaacagcttcacacaatagcatatctgtggctggccaagaatttcacatttggtttttttctaatttgaggtaggaatgttggtggcgggatgagatggaagcaaggtatgaggtgccagtccctttgtgctaatggctgacgggtgcatgtttgccctgtagtttctattatgtctgccaaacaaaagtcacctgtgtgaaagggggtggctaccaataattccctccacacaggcaggggtcagtggtgctggggactgtggtcactgcacatgctgcctttctggtgtccagcctcccatagttcagcggcatcaaactggtcatcttctggtcacattggacaatctgcctacaagagtctctcattggagtgacattaaggaaagtaattgtgaactacacttagagccaagataacttattaaatcttgtattgggaaagatataatgaacagctttattttaaactgtgattgaagtaggataccaactgatggtcataacaactataatttgtgcctgagacttaaataaaaagcacgcatcttgatttaacctaactttatattacctgattctcggtaataattattgaaagacttgcctttctccgcttttaatgtgtgtgctgctttagttctttcagaggacagtactctgacctgcatgcagcattacgaggaagtccagacatcggcctcggatctgctggattcccaggacagcacagggaaaccaaaatgtcatcagagtcgggagctgcccagaatccctcccgagagcgcagtggataccatgctcacggcgagaagtgtggacggggaccaggggctggggatggaagggccctatgaagtgctcaaggacagctcctcccaagaaaacatggtggaggactgcttgtatgaaactgtgaaagagatcaaggaggtggctgcagctgcacacctggagaaaggccacagtggcaaggcaaaatctacttctgcctcgaaagagctcccagggccccagactgaaggcaaagctgagtttgctgaatatgcctcggtggacagaaacaaaaaatgtcgtcaaagtgttaatgtagagagtatccttggaaattcatgtgatccagaagaggaggccccaccacctgtccctgttaagcttctggacgagaatgaaaaccttcaggagaaggaagggggagaggcggaagagagtgccacagacacgaccagtgaaactaacaaggtgggcactggcgtttttgttttgtctttgtgggttcctgttctggttaggaatctagctggccctggagttgttctgggaaatatctgcaaacactttccagtttgttgaatgatgagagctgttttcatgtaagctgtgtttggctttttccccctccaagtaataaaataccaaaaacttgtatttatcaaatatttctctcagcaccttacttggatattttcacattttttccatcatgtctaattagggccaaatcttgtttgcttcattttgatgtccacaaattaaatacagaaactggacactttgcccacacattttacccattctgcttgttggctgcctcagcagcatggtgacctttccccttccaggatccccaaaaatcagcatgcatagcaacaggtaccatgggaaccaactcacaggtgcccctggttatatctgattgtacaaaccttcatataaatcagtaggagatcttattttgtgaccctttctaaactatagcctatacttcctaaatttagatattcaacaaagctgtaaaatgcattagcaatccacaccttctgcatgtgtctgataacttgatatctgagccacgatgaagttcacatccctggttgttaaaatctctttgggatttaactaggcccatctacttcaggcaactaataattaatttctgttttctacacagaaaaagaggaaggttctctcttctattcagttttagtaggaaggacaagtagcaggttagccagtcactagtagccttaaaaaccttccgtagttcatggccagaggtgaaccctcactctgtttgtataaattagaccaagaaaatcattctttgtgctgttctctgaatgcatttcaacttttcatattatccatgaaatcagctgttgagagcaccaataaaagggtttatgaacatgttcataaaatataaaaatgcagtccaattttttgcccttcatagaaccaaagaccataaacctgatgtaaagttcatgctgcctaaaccagacaaagctttttacttacaagcattagaaagataagacgttgagttgtctaaccattgctagtaaacagttctccagatttcacgttaaaaactggaaataatcatctggaaataaaattatccttccacaatatagtaaaaatgagtaatccatcatctttatataaacaaccctaattttaagtgagttgagggtttgaagtatttaatattcattcatttatttaacaaaagatcttaataagcacctgctgtgtgccacacagtcttctagtcctggaaacaaaacatgtacatgaacaaaatccctgccctgtggaacttacatcttagtgggaagagacagacataaagtttaaagtttataagagaaaaaaatagaaccgaataaggggaactgagaaaacaggtggggagtacagttttggatagagtggtcagggtctgcccagctatgaaggtgacgtttgagttaaaggatccaagggggtgaggtttgtgcttttgtggaaagagcacgtgaagcagaggggatgcccagtgtgaggcccctgaagctagagcttgcaactggctttttaagggaagaggaggggactgctgtgggtggagagggaagagcaaggacagcagtgaggagaaagagaaccagagctcgatcctggatggccttggcttatagtctgaacactaataatgtcactagagtcccgagcagcagaatggcacaacctagcctatgttttcaaaggatccctctgactccagttttgaaataaagggtagaagtgaggagaacaattgggtagtgactctaataaaccagattagaaatggcggtggcctggatcagggaagaggcagcagaggtgatgagaaaagctaagccagagccaagagatttgcggatggatcctacgcttagtgagataaagaagaggcagtgatgagtacgaggctgggcccaacatgtgggaaagattgaattgccattaactgaaatgaagaggatacaggcagagcaggttttggggggagaaccagcagtcagtgttgggtacgttcaacttgagataccgattggacttccaagtagagcttatcagatggtagctggattgatgagccgggtaaagaggaaaggccagggctggatttgctgatgtgggagtcatccacagaatgtggttttaaaagtcatgagattgggtgaggtcacaggataggtgagtgtaaatagagcctggaagagctccaagaatagagatctggaaaaggaaccagcagaagagaccaaagtaggaaacaaaaacaggaaagttgtggagtcctggaaggcagtgaagaacgtgtccaggaaggaaggagtggcgggccgctctgccaaatgcagcgggtaggtcagggaaggcgagtctcattggtgcccttgacaagagcagtctctgtggaatggtagaggcagaaacatgactgaaatggattagaaagagaataggaagagaaaaattgttcggttgactttttagaccactctttaaaagattttgctataaagaagtgagacaggctgggcgcagtgactcatgcctgtaatcgtaacactttgggaggccgaggtgggtggatcacttgaaaccaggtgtttgaaaccagcctgggcaatgtagcagcaccccgtctctacaaaaaatacaaaaattaactgggcatggtggtatgcacctgtagtcccagctacttgggaggctgaggtgggacaatggcttgagcctgggaggtcaaggctgcagtgagccaagatcacgccactgcatcccagcctgaatggcagagtgagacgctgtcaaaaaaaaaaaaaaaaaaaaaaaggaagtgagataatgagtaggtagaatttcggagtaggactaggtttgttttggttttagaatgagagaaacaacagcatgtttgcatgtggctgggaatgatcccacactgggagaattcctggctcagtattcacacataggtatgtggagacagggtctagtgtgtaggaaggaggggatcacctgaaggaggaacatggaaaatccatttgacagggaggaaagaaaatagattaacgcagaggctgagggtggggctaagagttgatacaaatttcttctgattccttcagttttcttagccaactaggaagcaagatcatctgctcagagtgaagataggtgaggaggtgttggaagtctggggagaagaggagaagatgcaaagtagactgtgagttgagcagagactgagtatactggggaagcatcggatgatacggagcggctttaagggctcactagagggttgagttcacgtatgattggcagttgactatggagcttaagcttagtaaagcagtacaggacaccaaggagaagggcagactttgaaagcatgaatgggtcccaatggtgttgaaggagcattggaactgggttacagaaggagtgagctttgacaacgagcgctggtctgaaaggggttgcaaggacttgggctggtggagaggctgtggtttagaaaggcctggggtgcagccatgagggtgctgaggccgggggtggacatggagaggggacacagatagagcataaaatcagtgggggaagggaaagtcaaggaactgaagggcgggatttagaagggtacacgtttgttgaggtcaccaaaaattaagacaagggatgtgttagagaatcagtaaaccaagagccaaaatccttcagaaatcaggcagggggcaagacacaaaatgtgagtcagtttctccattagctttgaagtttccaaatgacttaaggatctttctgatgacgccagcaaactgtagaagtataaaattcaggcatttgataaagaaacaccatgtttttaaatattaatcctccatggatgatcaatccttcagtgacaattaggaattgaaacagtagtctaaataattattttggcttctttgtacctacagatgcaaatacaaaattagaggaaatttctctaaggataatactactagatatccccgaacatcatacatgtggtaatagattgcataagtgtttctcttcccataatttcttcgtggttccataaaaatcatttgaaaacgttgctagacagattatgaggaaacatgtgcaaaagaaaggttagattgttaacgctgaattactttccttggcttgtgtttgttctgacagagatttagctcattgtcatacaagtctcgggaagaagaccccactctcacagaagaagaggtaagttttgtttctttttaaaaagggaaaactgtagtaaagaatagaccttccccccttgaataaatgcactgtaatgttaccctttgaaagagctgaaatattctcctatgcctatgtttggagatgaagacttgggatgctggttttataatggcttggagagactgacgggcaggccagacaagaaggatggcaggacaagtagtcagctcaggaaaagaaactgagcaggaaagcagggtcaggaaaaatagagagggcaggggagaagagtgagaagagaaaaattccagcgtgggagcagtcagcagtcaggaagaccacatcagaaggaaatgaatcatgggttggaaaattcaggaaattagaacaggtgagtgtagggaatttgctccagcctgggagacagaaagaggaagtctccgtggggaaatttggatgctgagagcagattaacttcagtaagtacagttccaggcaggagctagggtcagacatagcagccaacaagagcagatcgcatattcccaagcaccagggtgcaaaattcacgagttagattttcaatgaagcattaaaattgttaaagccagtattatacatataatatgaaatatgtgtatatatacatatttcatatgtatatatataaatgttgagctatgctcagagagctaaacaccttaattgatctagctgtatatagcttctatctggaattcctagcagagtaaattgtgtacatgtacaagagcaaagtacatatgcaggtacatcacttcctataggactctgagtaaagcattagaatatggacatagacacccacgttgaatgttcaaagagcaaaaatgctttccctaggtgatattgcccaccctcgtccatgtttctacctccagaatggacctgccatctgtctatctggttgcacagaccaaaacctaggggtcatctcgatacttccttttcctcactgtcctccaacacagtcaattgccaagacccatcagttgcacctccaaactgttttctttgtgtacccacctccctcaagcccactgcggccgcccctccctaggccagagcagtcccctcctgctgatccctggcagctccttggcctccctccactctgttttctactctgcagccaaagtgatcccatctgggacaagaaggtaaaatatataggagttctgggaattaaagactatgtaaaattttaaattgctccttatcttacatttgtttgtattttttgaaacaggacctagttatactgatgaatttttaacatgacagaactatgactcacagacattcattttaggacaaagaggaaaaataaatatgaaagttttttttgtatttatgtaatttaatgttaaacagtccagactgaagctgagatctgagctttaagttctattaccccaatttaacagaatgttatggaaaggattgattagaaaaagaagagaaatggggaaaaggaagagagtaacttatgggaatatagcaacaatttacagactgaggaataatgatgaaagttttaaagagaaaaattgagaagctaaatagcaagggggctggaagagaaacctgtatacaaaataaaaataatagtcataatggtcatagaaaacagtcaaaaggaatatgagaagactcaagaagcttttataaaagttgaaatgtacagtgagaccctctgcacactaggttcattcccagagtcaatattaaattgcaagttaatgaatgaggacaaaggccaagaagaccaagtactcttacaaagagtgaggggcattaattacaaagaccagggggaagaaagctgaggagagaagctaacggtggtgaggggctgactctcattgttacaatctaggtcaaggtacatttgtcctccttgatgttaccaggtgatgaatacgctggtatgccgtctcccctcaccattgtcatccattgtttacctttttataatctgtccacatataatttttggcttggaccaccatttagataatacattctgtgtttgcacttccttataaacagcagtgaattttttttattaaattcaaagaaattataattcttgtattctgagagcagttttttcattaaaacctctaaggtgagaatgttaatcatttcatattcattaggatagtcagatcaacatagtaagagttttccaaagactgtttttctgaactgtaaacccttggattgtcaaggcctcaccaaactgagccagccaccagcctgtaatgaaaagttctcatgcaaatgaccagttagcatgtggcaggcctgtcttaagaagcttttgagacataagaaggcctgtcttaagacaggcctgtcttaagaagctggaaacttcacctgcagtatgtgagaaaagtggaagcaggaaaatgtccctcagcccttgggaagccaggcatctgtgaggaagcatgttcatgtatttcctgggtatttgaatgaatcaaatcactgtgataaaaataaacacaggtaatgaagggtatttttacttatttccaaccgtgatttttcacaataaaataatactccccaaaagtctcctaattagtatatttaatcttcacaatgaatgaaatccctgttgatatcggaggtgatacaggatttattagtgagactgtgggggtgtgcttggaaagccactggctcttaatagtatcctgtaagttgtcatttctgacttggctggttgcaagcgagaatgagttttcccactgaagaaaactagacctggactgtcaatgtctgtttaaccagtaatacgcaactaagtcaagaaataatggacaggaataccctttcagatatatgtgtaccaccaacgagaatccagcaacgggtgttggagaccactgtgatgcaggaagcatggagtagtctaattcagagttcttatactttactggccatcagaatcagcaccggttgctgggccccagccccgaggttctgatttggtggttctgggatgaggcctgagaacttgcctttctgacaaattcccagatcctgttgctgctggtttacagcccacactttgagaatcaccggtctactatgtgttttctgtccttttttgtaaagcagtggagccccttttcaggcaaaatatcattctgataaagaaatgaaataaaacacatgctgtggtcaggtccccggggccttcaggagcttcccactccacctctcctcaaattcctcggcagacccaagagaactgggttttcacggaattaagggaatatgactgatctagttaacatagttgaagatagtgtgtgtaattattctctagtaatgtgctccataattagtacagataagaaagaacaaatctttaaggagtacacacacagaaacccaggagtgctcagtatgtagcttgtcactaaaaagagggagggggaagtcacagctggaagtttattcaactctccctttgtctcctagatctcagctatgtactcatcagtaaataaacctggacagttagtgaataaatcggggcagtcgcttacagttccggagtccacctacacctccattcaaggggacccacagaggtcaccctcctcctgtaatgatctctatgctactgttaaagacttcgaaaaaactccaaacagcacacttccaccagcagggaggcccagcgaggagccagagcctgattatgaagcgatacagactctcaacagagaggaagaaaaggccaccctggggaccaatggccaccacggtctcgtcccaaaggagaacgactacgagagcataagtgacttgcagcaaggcagagatattaccaggctctagcaacccagaagacaaccctgggtagcctgtgatcagtgtctggagacgtttcttctgtggaagagaagaagtgacacaaacctatacttcatatgctgctttagtcacctgaagatggttggagaggccctgtcgactgttctcccagttgttcagtttctgagacagagaggtacggactaggctgcacctgagtgtgcccctgcctgccagatggacaggtacacccaagcacatctccctgctgcaccctcaccacccacaaaagatcccagctgtcagtggtctcatctcattagtgaggaaagccaagctgtatggaaaagctgcactcaccaaggaccacaatgcccccggcctaaagtactgccattcagaaaagcaggtttttcttcctctctttccttttctctgtctgctactgactttaaggctttttcccccttgaaatgtccagattcctgtggttcatcccaaggaaattttcacacaaagcttggcctttgccctcaatataggtgttttaggatggtgacaaaccatggctgctgctttctgcccagctcgccagtcctccccaaagagttgcgcatcagcacctggggatctggaccctgcgggtgaagggatggggagggacgtccctggagtctcttctgtctttgttccttcttattttggcattcgatatcagcagcctctccccaaagtacttgaagtcagttttagatgctttattttatttttctagtcaaaaacgtgtttcccccagtgtttgaaaactcgtccgaatcttttcagtattttccatgagtattgtggtacttctagacttgtttaagcccagaactcattccttcaaaacagagagccttaatctttatgttgggacacagaccacatatttggacggcagccatgcatccatcgctgaagggctgtggacatgaatgtgtatttcccatggtctccgctgcccacaccaacagtgtggcatctcataagttaactgctaccctaaggtaatctaagattaaaatgtaaacatttatttttgttatgtaagtttataagatgttttatgttcaatgcctaatttctcaaaagtgccagaaaaaaatgtatattagctattttgattttatgtacaatgatttatactctccttttgaaaagataccataaagcacataagctagatcactacaaggagctgttatcttttttctaatcaagtgtttaaaacactgatggtttttaaagactcacctttttaaatggtacttggagctcctgattcaaattacctagaccccctagagaaataaatggaatatacataaataatcattttcagtggtttatggtgggcaatattgcaatatttgaaatggtaaaaatggaaagaagaacaaaatatgatgagaggtggctgtgaattataaacctcataaaagtgtcataattccattaaggtttaattatattttttcagaaaacagtgatgaattctgtagtccagtgcttgccaatgcaaattgcctattggaatcttcttcctatattttacaaacatcagtggctgaaatagctcagagtaagagctcagcctggtttgaatttaatcatctctttagatcttataaggccagcattaggaaacttgttcacttttcattttcaaaggagcctagttgaagtgctattatgagtgtgggctatggaaagacagcttttcctacactgataaagaaaaaaaatgaggaaattatttcatccccttgtgacatctgtgactttttggatttaataatcttgctgtttttcctctttatgacaaagaatataattgggaggatgaagtgtcttaaaaattgtagagaccagctcactggaatgtttttccatccctgtattcatggcttgactttgtgactgctctacactgcatgtctgacattgcagagtgagctatgttgaggtaaactggttggttgtcattattttgcaatcagcctggtctctcccatgaagatgtcgtgtgcataagcacaatcatcactgattagaagatcacagcagaatacccttggattagagagaagttcgtaccttgcatttctctgaattctagtctctcataagcactgctttgctggatgattttcactgctttgtgttaatgactttgagcgatctctcacatgatggggttctttagtacatggtaacagccatgtcatcttacacacctagcattgtgaatgctgtagtgacatcctttataggcaccttacagctcaaaacttttgtttcatttcatgccttacttatcaaaaaggcaggaaagtaggtatgatctctaaagtaaaaaaaaaaaaaaaaaaaaaactttttatagaaagctcataaataatcatgtcattttgcaattttgttaccaaaatttcccccaagagttttcaaatattagttctgcaatgtggctatgaaatatgcactgaaatataccttttaatttgagaaccagtggttagaataagctgtgatataaagtattttcagtgtacttttaaaggaactataaggccctccagcataaacgctaaaagaatagatggtagcacaggccatgagggctgggggagagaagcagagtgaaccttagaaagatggctcagctatttggagcactggatattttactgaagttatttactgaggcaccatcactgttttgactgtacagtatagtttttcataaatttcatcacatttactttgttcagaatctgggcttgaatctttgagttggacaaaagcctatggtttcttttaaaaagtttcatcttgagctaatgctacagtttaaataaaatgtatgaaaggtagttatcaaaaacaatttgtatatttaaaattctattttgacatccattttttacagcgaattatagcaggttatgtgaaatttaaaaataaattttaggaaatttttttatcttgtaagtaagaattataaatctatctcagttaaaagtaggatctttgtttttattcagatattttgaaagtttagaagcattttgtatgctactttggtatttcttaagtatagtcagcaggaaagggtaacctgttttatgcaaaatttttttaatttgtcaaatgtttttagtgtgtctactttctgaaatagtctcaatatcctgtctgtatcctaggcagataactacacaagaacaaaacgctatatagaaaagaaaatatttgaggaaatcttaaattccataagaaagtaattcttgcaagaatgttggctacatatttttttttctgtcctgaataaattacatcattaggtctgttgaagcttttgaagctaccactattctttctgggataaaggctaattactgatttatctgccctcaaaatcccagagttaattctaattgagtactaaattaacagtaagtagttaacacagagaactaaaatttaaccgcattatatcactgtatatatttctcatgatttttgctaattagagcatttacttaaccagtaataaactacacacacacacacacacacacacacgtatacgtgtgtgtgtgtatatacttggctctgacacaactctggtgcttaattaggatatgttctattatgtattttgaatgtttatcctgctagtgtgatgaacttttgttggaaaagcagaattagaaggaacagtttttcaatcagtttcatttggtaattacaggaaaaccttgagttgctctaatttaatttttccaattaatacatttagactttaaattgcatccgtaattctcttggctgaaaaacagtggtattttaagacagttttgttatacatgtgacttacttttgactcagcctgagaggaggaaatgtaaagagataagagatttggcccaaagcagcaagagactagtaaccttgagccaggacgaagccaagacaacgtgactcccaagtagcaggagcagaggtcggtcacctgtggcattctgtttcattcccttttaaaattatgagactttataggcagtgtaaaacatcagcaggcagcgatgtgataggatgtgcgaaaaagctggtctgataccatggctataattacagagctttagttcaattaggattttgtaaatgagcaaatgacctttttttccagtgccccttgtaatagttaatatgagtccatgcaatcttgtgatgccattctcctgaaggtgttgatttctggtacccagccagcttagctttggctgctggaagcacagtaggtactgatgattacttcctggaaatcttgacaggcttattgtactgtgtaatggggaaaagttaaagtataatgtttggtgttaataaatgactgatgtgaaaataggaacatgtgtctttaatatcaaatatggctttatttgcagtgaaatctaaattccttattctacagtagtattttcttgccctgtgttgtatattttcctaaatacatttttcctgacagtggctttaggccagttgaacacacttagactgaaagtgtttaacttaaagagatcagtccagaaaccatgataaattagaatctttatctggaattaccaaattaaaatttaaaatcatggtccagaagagaacaaacattcatggttttttttatcctactgctcatttttaggtctgtgtttacatctagtctctactatttgtgaagtatgtcattatttttttcaagttcttctttgacttaactgaaaaataatattccaaattcttaatgtaacatgaaaagagaaatacaatttttgcttaaaagacattttttaaaaagcgttcaattcagtaatcatttctgttaatacaggaagtttttttggcttgccagttatatactgtgggtattttttaaaatgtgctacccttgggttgtctcatatcaccttgcgtaatcatgtattacaaaggttgataattgtcatttctcagatgtctgtatgttacattggcagcagtaaaatgttttaatgttgttaccttttaaataattgtgttgtattaacatgcctcatattttctggggaaacttgaaatatatctaaacaaaaaaggtctgttataaataggaattggcatttcattgttaatgttttttcctcataaaaatagttacaccaaaagtgacatattgtctattacatgggcccaatcagtattaaagtactccccttactcaaaaatattaaaaaataattcatgacacttagtagcattttcattgattgtttcaaaagatcttcataatggtcaaattgtccaattcacaaaagagtgagaaagttgttttcagtactgggaatttttaaaccttagttttaagaccaaaaatatctcttattagcttgaacattttgtgattacttttccctccccggatctagtccttttaaggagtaagtctaaagaatgaggccatgaagtcactatttcctcccacctcagtttgtctcctggtacttagctggcctatcgctttgtgtggcaatacccctgggtcgcttccccactcagccttctgtatctgctgttcacaggacatgccattatgtctttccagtacggatcacagtgctgccatatcacagaccctgccagccggcacagaaccatgcctcgtcacagctctgcccaactcacaggctgccaagatgaggccacaggtccacctagggcggcagatgctggtgctatttgtcacgacttttgccaaaacatgtacactgttgctcacatctttcgtaagaatggttgacactaaggggccatggaaaagcacttttaaaaaattatgtggtggaatcaaactcacagaggcagaaatgttagtgccgtgctctaaccaagtaagcttagtgttccccacagtgatctgtatctggcctgagtctcctcaagcagcaacccccactgtccagcatgtggaaggtagatccttatgacaacaccagacccatagttaccaggaaagaaaaaggaagctgagtgttgtgaaggggaagaaatcctttttataagaagtaatcatttttaggccgggtgcagtggctcatgcctgtaatcccagcactttgggaggctgagacaggtggatcacttgaggtcaggagtttgagacctgcctggccaacatgatgaaaccctgtctctactaaaaatgcaaaaaaaattagccaggcatggtggcatgtgcctgtagtcccaactactcaggaggctgaggcaggagaatcacttgaacctgggaggcagaggttgcaatgagctgagatcgcaacactgcactccagcctgggcgacagagcaagactccatctcaaaaacaaaaacaaaaaaaaaacctttttaaagtaaattgagtgtaaaatgttttcaccatgaagccattgcaccctctcccccaggaaacagtgcctaaggatgatgtcaagttacagccagtttgctctgatcccccaggacctaagaaaactgtgagtgcttcagcatgcaaaggtagagctaccagataaggagaataacttggccatttatagcaaactgcctgactttggagtgagaaaccaagcaccttctaggtcctaggataggtgaattggaggtgcagctgctgaagttcccattttctacatacttcaggagccagggtgtttcatttggttttgtaaaactttgctgtaagtcatcacagttaattctttgaatggacattttagagtgtaactttttttcaaaattagcagaacagatatctctgctcattctctttatacatttagttttttaaagttcccctagtatacctgttaggcactctaaataggacacagttaaagctaaaagaaggaccagttgctccctagagcctacagttcagaactatcttgttgtcatgtcctggtttggtttggtttgtttttaactcaacaagttggaaaccatgagtttaaagcaaactatttccttttcttaagcttaaagagaattttttttttaatctttagctcctcatttaggtagtgaaggcttccctgaaagacagcagtgcccttctctggaagaagaggctgggaccaaaagcctgagtctatgggttgaggattttgagcattcctttgacaagcttctatgtatttttaatataagactcataaatgaacctgatgtggtgttcatgacccatcccttaagcatgcttgctttttttaactttactttttgagtatagtacttgtcttgtttttcctggagccatgctaggatttaattcctatgtgccactacccgcccatgtcctggaagatggccatgcctgcagcaatgctcatgtcttgaggagaagcaatgtgaaaagcatcaggaaagctgaaccttacgttcaagtcagcaaacatttgtgagcattctagtatgcttgcgaccttgacactttttaaaaattatctttttatttgcttcgagtatcaaccgtatagttgactctagtggggcgaagggagcagagatgagagcaaaattcagacttgctgcccctgtgtgtctcagttctcatgtctctctgagaaatgtgttggcccaattccctatctgccactctgagtctcttgagtaaatgtgtgtaaatgagaaaaattatctcaaagatttaacttattatttagatattttcttctttttaaactcaggaataaacctggtttgtagataatataatatggctactagagctataattgagtaggtgactagaagcattttttcaaatatatttcttgtaaagacatctactttgttttaactaggaaaagaaactcctcatattaaaataaacatttccataagcactttctagaagagtgtagcatccatctaccatccatcccagaatgtttgtatcttgctcatagtatttcaaaaatttttatgggtgaaaaaaatgcacttttttatttattggaaaagtgtagagttattgaattaaattctcaagtgggacaatttagtgtaaagggaaacatgggttttggagacaagagcacagggctgtggtccctgttccagcattgactttactatgtgacctcgagcaaatgatttaacttctctgtgcctcagtttctccatatacaaaatggggataatgatactaaccattgcctacctcatagagatgttatggggacaaacgaaataatagagataagcacgaatgctttcaactcttcggaagaaaggtgctatataaattgaagttgtgtttttaatgatccaattattaattatgtttagggtttaaataacaatactgttagtcatgttaagaataagttttgttttgatgcatatttccacttctcttctgtggccagatcttgatcattcaaccagtaatggtacctgaggaactgaaatgggtatttgttttcgtatgtttctgccagtagtatttcaattgaatatccagaaaagactggagtttaacttgtaatatcttatagtttacatgtaataaaacttattcaagctatatataaaagtatgattacatgtaaatagcaggtatgttgtaattaaaggcacttatcaaattgtctttgttcttttttaattgtaataaaagtcagttttacataaaggcttgttaaaatttatttggtatttgaaaaggtcaagaatggctaatttatgtacctttcatacattaccagggttttgggattccagcagtcaactcaccaccataacaggaaagataatgttcctggtaatcagaccaaagtgtgtagaggttagcatcaaaaactttgcagaaaaggacccgagtttgaatcccggctccatcatgactttgaggaagctgttagacttctttgtgccctccttttcacattaggaaatgggggattatagtatagaacctgctaatggggttgtcctggggattaaatgagatattaagcatggtacctggcaaggtgctaagtgctctgtgcatggtaagagaccatcttcacaaaagggctgggaaatttttgatggcatttacccacacttgccaagcactcctatgaagatgtgcaacctgagagcaaataattccccaggccaagaggaaaatccatctgcttgttgtgtgaaggggatgcagccccagcaggatgtctcagagcaaatgactttaaccaccatctgacctggctgcccccttcctagtcacttaagactggccttggggccaaaaggcgaagcagtgagagttttctttggcatgctcctgtcttatttttgtctgtgccctgtaactacaggacaccccaaacccccagattgcctctttaacacccaccacaacccagcctccctttctgagatttttctctgctttctccttctgttccaccccatctgcaccattataaatactcaccctgttccatatttctccagggactagcccgcttatttctacccaactaactgttcctgtacagtgagtgaatatccctcctactccgaggactgtttacagttgtttaaggagcttgctgcctatcacagtcttgagcaaaaccacccttcactctcatgggcacggcaaactcctgagagactgctgggagtatttgggcatagaagagaggacagaggctcccgcagatcacacgccacatcagcaaatgcctgctgagccctcacagaggccgtgcctgctgctccctgtcaaagggtctcatcttgcctggttgcttccttgcatgtgatgtaatgatagcaacctagaggcagatgtgcgtaagggcctggccatcttggtttcaaactctggcttcatttctcaccacacgggcagaactttcctttcccagagtattaatcacaactccattctgtgtgtggaggctcagcgctaagaaatgtttgttctgagtctttggaacacagatcctggtttcccacctgggctgtctggggaaatggaagctccagagctcagcagtttcgaaggttccctgtcacctgtagaatggagcactcgcctcttctgtcagaggtgggtgtactgccgattctaggacgtagacatttaccaagtgctcattaagaggactggagaattctgataccctagttaaggtgagccaaacagtccagactttatcattttttttttaaatgtttctccttgggtccatctttctacctctgtgaatacaatctgca

SEQ ID NO: 443 - DNA, 1619 bp, Homo sapiens
atggggcccgcggggagcctgctgggcagcggacagatgcagatcaccctgtggggaagtctggctgctgtcgccattttcttcgtcatcaccttcctcatcttcctgtgctctagttgtgacagggaaaagaagccgcgacagcatagtggggaccatgagaacctgatgaacgtgccttcagacaaggagatgttcagccgttcagttactagcctggcaacagatgctcctgccagcagtgagcagaatggggcactcaccaatggggacattctttcagaggacagtactctgacctgcatgcagcattacgaggaagtccagacatcggcctcggatctgctggattcccaggacagcacagggaaaccaaaatgtcatcagagtcgggagctgcccagaatccctcccgagagcgcagtggataccatgctcacggcgagaagtgtggacggggaccaggggctggggatggaagggccctatgaagtgctcaaggacagctcctcccaagaaaacatggtggaggactgcttgtatgaaactgtgaaagagatcaaggaggtggctgcagctgcacacctggagaaaggccacagtggcaaggcaaaatctacttctgcctcgaaagagctcccagggccccagactgaaggcaaagctgagtttgctgaatatgcctcggtggacagaaacaaaaaatgtcgtcaaagtgttaatgtagagagtatccttggaaattcatgtgatccagaagaggaggccccaccacctgtccctgttaagcttctggacgagaatgaaaaccttcaggagaaggaagggggagaggcggaagagagtgccacagacacgaccagtgaaactaacaagagatttagctcattgtcatacaagtctcgggaagaagaccccactctcacagaagaagagatctcagctatgtactcatcagtaaataaacctggacagttagtgaataaatcggggcagtcgcttacagttccggagtccacctacacctccattcaaggggacccacagaggtcaccctcctcctgtaatgatctctatgctactgttaaagacttcgaaaaaactccaaacagcacacttccaccagcagggaggcccagcgaggagccagagcctgattatgaagcgatacagactctcaacagagaggaagaaaaggccaccctggggaccaatggccaccacggtctcgtcccaaaggagaacgactacgagagcataagtgacttgcagcaaggcagagatattaccaggctctagcaacccagaagacaaccctgggtagcctgtgatcagtgtctggagacgtttcttctgtggaagagaagaagtgacacaaacctatacttcatatgctgctttagtcacctgaagatggttggagaggccctgtcgactgttctcccagttgttcagtttctgagacagagaggtacggactaggctgcacctgagtgtgcccctgcctgccagatggacaggtacacccaagcacatctccctgctgcaccctcaccacccacaaaagatcccagctgtcagtggtctcatctcattagtgaggaaagccaagctgtatg

SEQ ID NO: 444 - protein, 432 aa, Homo sapiens
MGPAGSLLGSGQMQITLWGSLAAVAIFFVITFLIFLCSSCDREKKPRQHSGDHENLMNVPSDKEMFSRSVTSLATDAPASSEQNGALTNGDILSEDSTLTCMQHYEEVQTSASDLLDSQDSTGKPKCHQSRELPRIPPESAVDTMLTARSVDGDQGLGMEGPYEVLKDSSSQENMVEDCLYETVKEIKEVAAAAHLEKGHSGKAKSTSASKELPGPQTEGKAEFAEYASVDRNKKCRQSVNVESILGNSCDPEEEAPPPVPVKLLDENENLQEKEGGEAEESATDTTSETNKRFSSLSYKSREEDPTLTEEEISAMYSSVNKPGQLVNKSGQSLTVPESTYTSIQGDPQRSPSSCNDLYATVKDFEKTPNSTLPPAGRPSEEPEPDYEAIQTLNREEEKATLGTNGHHGLVPKENDYESISDLQQGRDITRL

SEQ ID NO: 445 - DNA, 35183 bp, Mus musculus
  misc_feature (1)...(35183): n = A,T,C or G
tggctcagtgcttgagagcactggctgctcttcagaggtcctgagttcaattctcagcaaccacatggtggctcacaaccatctgtaatgggattcggataccctcttctggaatgtctgaagacagcgacaatgtactcacatatataaaataaagttaataaaaaaacaaaacaaaacacctaaaaatcctggggtgcgtggcgctggaaagatgactcactggtaaatgcagtggctgctcctccaggacgtgggttcaattcccagaagctcagaacctcacaactgtgtgtaacgccaggtccaggggatcggacaccctcacacatgcatgcagacaaaacaccattgcacataaaatacaaattaatatactaaaaccatcttggtctacacagcaagttccagggtgggaagggctacatagtgagaccctgtttcaaacaaaaaacaaactcacaaagcatttttcctggttgagtttggcatccagggtccctgcagccagccatcatgagctgcccctgagcaggcagtaagggtctccatatcaggactcagagggcccagtgctccaggtcagagcaccttgggatcctgtgtaatgcttggggaatgaggccaggctggggtgagcctcgagcctcgaggacaggcagcatcctttaggtatctttccctggtaggatctccttctcagggaagggaaaggcaggggcctctgctggcctgtcagggtcagggctggaaaacccgtgggttctgtgatttgggatttcatcatttctttttcccttaagtttctggttgctttaactgattccatgtgtgtgtgtgtgtgtgtgtgtgtgtgtgtgtgtgtgtgtgtgtgtgtatctggttgctttaactaattctctctgtatgtgcatgtgatgagtgtgtgtctggttgctttaattaattttctgtttgtgcatgtgtgtgagtgtgtaggtctgtgtgtgtctgtatgtctatatatctgtatgtatagaatagaaaagggcataagatctcttggggctcgagtgataggcagttgtgaggtactccacgtgggcgctaagacctgaactctggtcccaagtcttcaccaccgagccatctctctggctttccaagctcagcttatttcatgtggtcctggggatggaactcaggtcccctcatgcctatgcatctagaaccttagcacccaagccatctcctcctacttttaaatttcttttaacctataaactttatcgtcagaactgactacattcatgatatcatcatcgctttgagctgtcctgtggatcgcattcttacatgcatcaaaactcacactgtgagctagagagatggttcagccgttaagaacatattctgctctgcagaggacccaagttcggttcctacacccatgtcaggtgactacaaccatctgtgactctagcccatggggactcaatacctggaacctcttatgggcacagcactcgtatacactccctaacacagatgcacacaacacaaatacactgcattttaaataatgaaaataaatcttaccaggcatggtagtgcatacctttaaccctagcacttgggagtcagagacaggtagatctctgagtttgagcctggtgtacagagtcagttccaggacatccatggctgttacacagaataactcatctttttgagatgcaaaaaaaccaaacacaaccaaccagacaaaaagatcatggttatgggacttgggagcacttgcctagtatctgcattctggattctactgtcagctctgagaatgaagggaagagtgggagggagagggagggaatcacagcttcaaataagctttattctccagagagaagatctggataggaggttttacaaaattccacacgagaagctgccagtgcgtagctatgagagctccattctcctaacaatgagtatagttatttctctttttgctcccattggtgatcctgagtgtttattcagtgggggtaggcaaagcctaggatggagacagggctccctgggacagggatggagggtctctgtcagctctgacccaccatgctcagactgtatggcgggggacagatctcccactgttaacaagcaagaaaggaatgtgatcacattattctaaaataccaaagtagaaactaagttaggagaaactggttctttaggactgcacagtgggtaggagcctgaggtgagccacctagtgttctcaacagcgagttacaagtaggcctgtgtttccagctctcttcctatggtttgtgacatcaagacaggctggctgcaccttggccaagatcccagtgaaaacagaaccaatcgttagccaagagagccacctgcttgcctttgcgtttgtacaggctctgcccaaaaccagcccactgccagttgtccccacagtacactcgtgtgacttctcaccagactcctcctcaaccatgaagctctgactcaaatgtcagtccttagtgaagttgtccctttgccctgccccctcctcagacagactgtctacactcctacagcaccttctgtgatggcgcaaatgactaggctgtatggttttttggtttttaatttgttggtttgttttgggggacagtttaatatgaccaaggaatggctttgaactcactatatagcaagggatgaccttaaaatctctctctctctctctctctctctctctctctctctctctctctctctctctctgtatgtgtgtgtgttcctgtggagaacagacgacactatgttcatatatgctatacagacaactctgcaatatttccttgagacagggtttcttactgaacttggagctgtcaggcattggggccaggggaggcgaggctagtggccagaaagcaccagtgaccctgtatcttcacttcctcctcttcccaaggcactagggttacaggagagcatggccacacccaactttttcacatgggtgctgtgggtccagactcaggtcctcaagtctgcacagccagtgctcttatacacagagccatctcccgagtctgtgaccttgacctgctgatccccctgcctccacctcctgagtgctggcattacaggtgagtgccaccatacctggcatgtgcagtgctggggactgcagatgctcagggcactgagcaagcgagcccccgactgagttccaaggccaggctgtgtggctgtgagggtgtcagagcagggagccttccaacgttgcgctgcatcgtctttacagagagcccaacacccaggctgccgaatacagggttgctgcccagaggtgtaagcacaggagtgaattccaaaatactctctggagatgattagaggcctaacaatgagggctgcagggttggaaagaggtttctagttgtttgttgttttgttctgggtcatctccatctgtggcccaggctgggctcaagtgcccctctggagtagctggaattacaggcatgaactatggtgatccatttatgatcagctgtaataacggtgtggtggataaatagagaagttatatcatttactgcatacagctatgcgctgtgccagcagaaatgccccttgagtcagaatgctgacatttggggtctgtaggctataatggttagcctgccccgtaagcccagaaatcaggaggctgaggcatgaacccagcttgagctatgtgcatatcaagactctcactttttttaatgtctggaggctgggtcctgccatgagcatgctttaagtccaacactctggaggcagaggcaggtagatttctatgagcttgagcccagtctggtctgcatagtgaattcaagagtagctaggactatgtagagagagagggggagaccctgtctcaaaatagacaatttaattaattaaaaaaattgaaagggccaaggctggagagatggcacagtggttaacagcactggctataattccagagaacccagttcgattcccagcatccacgtgacaattcacaactgtgacttcagtcccaggagatctgacaccctcttctggcctccttgggcaccatgcgtgcaggtgacacacagaggtacattcaggtcaaatacccatatacatttttttttattttaaaaataaatgctgggctggtgagatggcttagtgggtaagagcacccgactgctcttccgaaggtccagagttcaaatcccagcaaccacatggtggctcacaaccatccgtaacgagatctgactccctcttctggtgtgtctgaagacagctacaatgtacttacatataataataaataaatatttaaaataaacaaataaatgtttacatttttttaaataaggaagaggaggcaaagggaaggaagggagaaaaggtatttctgtttatgtaacaatttactgctggcatttggggcatttgacgacttaacctccttccatttgtactcttgttattctgctagggtcagaacatgctctgctttctgccagcttgtaggagagaagagaaggatgcctgatggcttgtatgatccaaatctggaagaaggtgtagcacttgtacacacactctgtttaaccagaattcagtcctgtgttggcctcagcaccaaggatcctgggaaatgtagtttagatggaaaaaaacaagcaatcccaaccacagggagggaataccaaatggaagatttgctgtagaaaacaactgcagccgggcgtggtggcgcacgcctttaatcccagcactcgggaggcagaggcaggcagatttctgagttcgaggccagcctggtctacaaagtgagttccaggacagccagggctacacagagaaaccctgtcttgaaaaaccaaaaaaaaaaaaaaaaagaaagaaagaaagaaaacaactgaaagatgcaaagaagaaaaacttcaaaggtgacccagaacctagtatagtagcacctgtgatcccagcacttgggagactgaggcaagaagattgccctaaattagcgggcagcctggactacatagtaagttccaggctagcctgatctacacaacaagatcttgtttctcaaatcaaaccgaaacataacagaagaccagccaggagagaacgggtgacagtggctgggagaacaggaaacagcagtgggaaggacggtgggaagcacttccgggatccaaagcgaggcaagcaaggggctggggcgaaaaggcctgcgtgagggtcccttaacttctaagcctggtttgcctcaccttactccccagtgaaggggcacaggaagtgggggcggaggggctgggagaggctttggtaatcagtccccagaagactgtagcaagaatggtttccagtgaagaaatggagaccctgctggcccttggcaggagctcctgtctcaggatggtgaaagcttcctgggcctacctctctccctcatcttcttccctcctcccctccctccttcattttctttaaaaacagttttacaactatttatttatttaatgtttgatgctcttccagaggtcctgagttcaattcccaagaacccacatggtggttcacaactatccacaataggatctgagaacctcttctggcatgcagacacacatggagataaagcactcatatacataaaatacataaacacatcagtcttttttaaagatttatttatgtattttatgtatatgagtacactgtagctgtatggatggtagtgagccttcatgttgttgttgggaattgaatttaggacctctgctcactccagtcatctcctctcacttactccttgctcgttctggctcaaagattgatttattattatatataagtacactgtagctgacttcagatgcaccagaagagggcatcagatctcatggtggttgtgagccaccatgttgttgctgggatttgaactcaggacctgcggaagagcagtcagtgagctgttgagccatctcgccagccaacatcagtctttatttaatatttgacacatatgggagctttgactgcatgtctatgtgtgcatcacatgtgtgcttggtgccggaggaggtcagaagtcaggggaggtcannnnnnnnnnnnnnnnnnnnacagagcacagagcatgcaagcacagagcatgcaagctctgttcctcctcctctttcttcttaaaaatttaaagataagattaaatcaatttttaaacataaacataatgttaagatttactattgcatacatatctaatcatcaactttttttaaagatttattttatgtgtatgcgttttgcctgtgtgagtgtatgcatgcatatcatgtgtgcctgatgcctgccttgtttagaggttagaagaaggtgtcagagatgtttgtgagccaccatgtggagctgagaatggaaaggcggtcactgaaaaagcaacaagtgcctttggatcattaaacatttacgtattttagtgaacaatctattaacaaggaaaaaacactaagttttttctgtaggcataaattttttgcaacctatttttttttttttttaaagatttataagcccggcagtggtggcacacgcctttaatcccagcacttgggaggcagagacaggcagatttctgagtttgaggccagcttggtctacagagtgagttctaggacagccaagggctacacagagagaacctgtctcgaaaaacaaacaaacaaacaaataaataaaaattaaaaaatatttatttgcagtgctggagagatggctcagcggttaagagcgccgactgctcttccagaggtcgtgagtttaaatcccagcaaccacatgatggctcacaaccatccataatgagatctgatgccctcttctggggtgtctgaagacagctacagcgagcaagcgagccagcagggccagagtgagaagaaaatgtgtctgaagacagctacagtgtgtttacatataataaataaataaataaataaataaataaataaatctttaaaaaaaagatttatttgcttcatgtatatgggtattctgtagctgtcttcagacacaccagaaggtggcatcagatgcccattacagatggttgtgagtcaccacatgatttctgggaattgaactcaggacctctggaagagcagtcagtgttcttaactgctgagccatctctccagcccattgcaacctacttttaataagggttcaaccacccagcagaagtagtggaagagaaaatttattaggatatggaggaagtggatctgttcagctatagctctttgggggcaagctcgatcttcttaggcagcagttcagtcctgtagcaaacaccaaacacgaccagcagctgcagactggtcctctaggcaggcagacaccagacatgaaccagcagctgcagtccagtcctttcagcaagcagacaccaggcagctgtagttcaatcctgaagaaaccgccaggctcatcagctggcctgaggcaaggctgtggcatcagcaagctgccacaggaacctcatgagcagttcttgggtgagtttctctcaatggttgccatatgacaaagtgagctcaacaacactgtaaggcgaaccaatacatgcgaagaaaattgaggtggagcaaaccaaactcctcccactgtctgtgggccatatttctatgccttcatcacaggtccttccacctgtctgctatatccaagcatcctttcacttgtgtctactccagcaaaacatcacttgacataactaactttccaaaacaaaacaaaacaaaacctagatgtttccatttcatctttctgcccagatctttttgtttttgagatgggagggtcttactatgtagaccaagctgacctccaactcagagatccacctgcctacctctgctctctgggtatggggtttaaagctgtgtagttccatatctggctcacagacttttttaaaaaaagattttttaaagatgctccttctgcctgccttgggatcaagatgtagaactctcagttccttctccagcactatgtctgcctgggtactgccatgctcctgccttaatgataatggactaatctttgaaagtgcaagccagtcccaattaaatgatgttctttataagagttgccttgatcatgctgtctcttcacagcaaaggaaaccctgactaagacacactataacatcagaggtcatatcttatccacagggcagtgttactgctggcaaacagctgatcccactggccggtcccagggacctactggctgcttacatcattacctgccaccaccaggtgtgccaggtatgagctcccagacaccccagatccttctctgtgtcttctttctgctctctctgccttgtctcatgtttctttctcctattccctttccttgtctgtctgcctgtcagtttgcctctatctccttcatgttctctcctccccaataaacctcttatactagatctgttttgtggagtaatttctcatgggaaccttggcatgagtcaagggtaccctaccactctcgcttgcatctatcctgtcagttacagcgtgatgggtccagcactaggtaagatacatgtctttcccctcccagaagcctgtatggcattgtgcaggctagccaacagggagaaagtttcctggtcagctcaaggttaattttgttatgttctgcattaggagtggtattctcagcaatcgagtctcaccctgtagttacggtgcacagccaagagcaatagcagtagtgtgctgttttcggagcatctggagccttactgaccagtaactcacagggagagggctcaccccggcactgaggttctcatttaataattcatgtcttctgggaagcactcatgcagggtacttctgctcaactccctatttaaaaaatattatatatttaaaaatagctttcagaacagtgggttcctgcaatgcttcctcatatacgcttagtttgggcttcccttccccccacccttttctgaatctcttttcttcactttaaccctgagtctctctctctctctctctctctctctctctctctctcactctctctctctctctctctctctcgtttcacatctcagtgttctactatcttcactaatagttttttcttgggttggaagatggtttccctatagctttttcatataccttttattttggctaaccttgctccctcccccaggtttgacccttccccattccatccttctctactttatttccctgacccagcccttaggtatccaccccttgtggtccatctctagttttctggctcccacgtgtactccaggttaaacatacatgaccaaagatttagagctaggagccacatatgatccagaacatgcaatatttctcagtctgctacaaagtcactgatgctacagtctcctccgtcacccttagggcctcatccaaaacccctcctccaaatttctataaatttgggggggtaagttttcaacacactgactttgggggagcacattcagactgcagctctcaggaaaagtgggagggatgaggggatatttgtggggttcctactctgtccctcagaaaatttgagataaaaagagaatgggccgcatgtgcttgtgcgcgctttaatcctagcacgggctggggacacaggaggtggatctatacagtgagagcctctctctggtggggttagggagaacggaattggggcttgagtgcaggtctgggatccacgattttcccagcacaccactaacaaggctttccggccctcataggagagtgaggtccggcattcatggccctgcactccgagggagctccagcagggctggaagtggagaaaacagggcctgtttggtgccagaggagtcagaatttctaagtgctcacagctgagcacttcccactgattctggggttcgcagtggggctggctcagcgagggtccaaagaggtgtaccgtgagggctcttaggaaggactgacccagctcggcccctccctcccctctctctggcagccccacccccagcctcagcttctgggaacattcgacctgaactgtggtgaacacactgacccgctggctgctccaagtcaccatggaccctgaaggtgacctaagtctctgctctgtgttcctgttttctatgtcccctactgcccgtccctcttcctatttcagccatctgcctccctctctcttctctaaagaaccccttgtggcctctccttggatcttgttcccaagtccgcttctctctgtcttgtttgaacctccaaaatcctcctcttgcttcgcggttctttctgtgttgagccctacggaagggcagaagcttgggaacagaatggatggggttgctctgctggggtcagatggactggtagtgggagtttggaaaggggagcagccctggactctgtcccttgttagcagccaagagaagcggaggcaaagtccggtctcatccctgtagagtgtggggggcggggaggggatgaagtcggagactgcgctcaggccgcagagtctggcttgggactcacagcacctgcttgagcctagagtgcatcaaggacaggctgcagggccatcggaagacttctacagcctcacagcctctttttcttgcagtagcattgggtctggggtgtagctcagtggtcgacacttgcgcagcatgcttaagaccttccaccctagtaggtttgccgctcttatttaaatcttttgtgtttccctttcctccctggggcctcctcccccatcctccccactttcctgccggtttgcatgcaactcctctggcctgcctgtggagcctgctctggatttgtaggtctggctagaatctggggagttgcctgtgctgatcgggctggcctcaaacttaccgaaatttgccgccggccgcctgccaagtgctgggatcaaacccgtgtgttctgcctggtctgcctttccctcctaacattaacactgccctggatttgaggccaggggattcacagctgtgggaaccctgggaagttacccagaaggattctaggtttctgcatctggaagatgcttcagggtggtagggaaactcaaccacctttgcaagtgtcccggttcctgagttctttactgaggaactgtgggtgggtgttcagggagggcatggatgcccaacatgaatatgaaattctgagaaaatagccatggattcccttttctgagaaagggggttcaataatggcatttttcatccaacccgggtttctgaatttttaaacttattattgtatgtgagtgcatggtggtgggggtgtcaggtgtcacagtgtggaggtcagaggacatcttttcagaggttgttctcttcttctttccacctttgtacgtctctggggatggagcttggggcctcctgaactgtctttcccctctgattattcatttagttttgagacaggtcctcactgtggagccctagctgggctggaacactcagcaatcttcctgcctatgcctcccgggtgccgagattaaaggggtgtgcctggttttgtttattcctaagacagagtatttttttaatattttaaattctgtttatgcatggcaggagttatgcacacatgtgtggggttgccagatgccataggcattgggtctccctacagttacaggcggttgtgagccacctgatgtgtgtgctaggaacagaacttggatcttctgcaagaacagtgtggacttaacctttgagcctcagtgatatgcagggccacatctccagggtcttgattcacagcccaacatggcttgcaactcatgtagctcagagtgaccttgaacttacgatgagccccagcctcccaagtgctgacattactggtgtgtgatccaccacaggctccagacccaaattcttaataagaataaattaaaaacctcacatactcaaggatggggtctcgagagagggctcagtgggtaaagtaccagccttaccagcatgagttcagattccccaggactcacacaaaagttagcctgcaatgctcacactcggtgtgttgaagaggcggaggggtgggagttgtaggcagatcctgagttgagctcaggaatgatagaaaaacacagtagacattagccaggtgtgagtttgaggccagcctggtctacatagtgagtttcaagaggatcagagctacacactgaggtcttgtcttgaaaaagaaaagcacactggtcattagtctctggcctctatacacaggctcaaatgtgtgtgcgtgcacacacgtgcacatacacactcacacacactcccctcatggacatctctgtggcctcccaagcacagagcttagaggggaccccagagtcacctacataaaatcccatttctgacacttgacagctatgccacctagaccccatacttcaccttgctgtgctcagctttcttgttggtaaattaaaaatagtgtctttcccagaggattgtgggattaaacaccttcacaaagggctggtagccagaaacagggtagagagggagccttcaactttgtccctgttctttgttgtttgagtcaggatttctctgggtagccatggctatcctagaactcactctgtagatcaggctgaccttgaactccgagctccacttctggaaccctgactctccatgtttggcgagtcagactctcttcctgtttcttcatgagctggagatggaggttcctcccactcaccctattggcctctcggagccaatgctcacatcgcaggactcacctcccagcatctggtcctttctcttttgcttccctctgcccttaaggttctggtccacactgctgcctcaagcatgtgacatctgatgtttgactctggctcaggcagaaggctggcgaggaccagtgacctgcataacataagccaggacacggtagacaaggaaagggctcgacacccaggctggggagtcagggaaacaaagggtcagccagtctagagtgccacagaagtccctgggagccagtagacacagtgggcatactgggcaaggactgagccctggagctgtgaccttgatgtgacctttagaagcacaccctgttgtcacagttcactctggttcaccgcctctcgccaaagctctttcaatagcttcctaaccaagaaccctagacacggtttaaatgtatacatgtgtgcaggcaagcatgcgccatagagtggaggtcagagggcaacttcctggagtcagttctctccttccaccacgtgggttctgggaataaactaagtcatcagacttgaaggcaagtgactttgcacactgagccggctcactggcccctaaatattaaaaccgcaatcttcattgtttttatcctctgacttccaatcaaaattctatagtgactctatagagcctggctctgcctggctctgcctggctcttttcactacgcatctttttctctctttcctttctctctttcctttctcagaacctgaaccacatttgccagtatccaccacatctccagggtgcctgcagcctctctctaccattgagcagtctctctggaggaggtctaacttgtgttcagagccagccctttgcagcctctccttcgccctcacactctcagcaaatcatccccccgccacccctccaagtgtgtgcgccgctccagccctcggtcatagggggtctctactgggtcctatttggaagtcatttctgttccctaggaaatgagggtatttggaaaggacgcatcagggaggagctgtgttgactagcctctatctccacctgctgtttgtccaatgaatcaacaaagaaagccgagggaagagctgagctgggagacagactcctgagccctgacactggtggctaggctggactcagatgtgagtgtccctctgcctcacaacaggcagtcctgtgactcctgtgacaatcaccttcagagagcccaagggaacatgggcggagtcaggatagcagtccagatgtttctgactcatacctcccaccattctcattaggccaggagccagcccggctttatgaccgagcctgaacttcccagtagtgtggacttaccctatttttcttacccagtatcagactgaagttaccctaaggagatgtttgcttgtgccttctctttggctgagacattactgaactaatggtctccaaaactttagaatttcctgggaacctcatgctgaagcccaggggcagccagctggggagggtgtgtccagtaggaggctacacacaggctactggtcacaccgccttgtcagaggagcgctaggatgggcagaagcatccctggtcaggacggcttagtttattcatgcttcttgccctgtatctaatctagacctcaggtgaagatcccagtgatggctcaggcaggccttgaatttgaaattctcctgtcccagtgtcttttgtagttaaagttacaggctcataccaccactcctgaaacactttttttttctttttttaggatttatttatttattttatgtatatgggtacactgtagttgtcttcagacacaccagaagagggcgtcagatcacattgcaggtggttgtgagccaccatgtggttgttgggaattgaactcaagacctttggaagagcagtcagtgctcctaaccactgagccatctctccagcccccaaacacctttttttgttgttcatttaaaacaaaaatttaaagaaaaggtctcatttgaccaaggctggcttcaaaccatctattttgctaagggtgaccttgaacttctgatccttgtctccatctccaaatgctggaattacaggtgtgcgggagatggcacccagggcttcctgcatgccaggtaagcactccagcagattagctatatatcatggctgccaagccaattttatcagagttttattctcccccagataaaaaggtatcccgtggggcccaagagagggctcagccattaagatcattggctgctcttccagannnnnnnnnnnnnnnnnnnnnnnnnnnnnnnnnnnnnnnnnnnnnnnnnnnnnnnnnnnnnnnnnnnnnnnnnnnnnnnnnnnnnnnnnnnnnnnnnnnnnnnnnnnnnnnnnnnnnnnnnnnnnnnnnnnnnnnnnnnnnnnnnnnnnnnnnnnnnnnnnnnnnnnnnnnnnnnnnnnnnnnnnnnnnnnnnnnnnnnnnnnnnnnnnnnnnnnnnnnnnnnnnnnnnnnnnnnnnnnnnnnnnnnnnnnnnnnnnnnnnnnnnnnnnnnnnnnnnnnnnnnnnnnnnnnnnnnnataaggtctcccatgagagatcaggtttaccgccacgtgagattatcctctccacagtccaggtgcctaggagaaacttctccacagatgacgtggcaagggctctagtcagtggcggctgacagctgtcccccccaggcagctcactgcaccagccgggttcctcctccgcctgcagctcagtgaagcttcccgctgcagttagtgccttccaggggcagctgctggttagtaaaggctgcttattcagaacctgctctcagagatcccttttgttggacatgttagccggtgggccttaaagaacaccagaggtgtttgtttattccctcaagtggaaacagtgtgaacagtgtgccctacaccaggcaaccagggtagcttgtcttggagacgtctgtgtcggggaagtctgggggctgaagcagctgggttgtcctgaaagtcctcactgtggagaggaagaacagtcaagctgcaagcctcaccactctagctctgcgcttgaggaagcttccctttccatttccagccaaggttttccatctataaatactgtgtgtatcgtgagggactgtgggtaatgactgttgtgcaccatgggagactgtgggcaatgactgctgtgcaccatgggggactgtgggtaacaacttctgtgtactgtagggactgtaggtaggatctatgacagcacacaaccagcgccctggtatggcaggcccaagtgtgtggtggccatcgatcttccctgactgagaagctctgctagcaattagattcacgctcctccttccacatggtacccgactcccctgctggggcccagggaccaacatttgcacagatctccactacttctgctgttcaagaaagttcacagagactggggagacagctcaagagttagagctctgctgcaaaggactgaggttcgggctctagcacccacacagtggctcgccatcatctgtgactccggttccaggggctccaacaacttctggtcttcaagggtacacatgtagtgaatacatatacggacgtgaaacactcatacacaaaaaataagtaaatctaaaaaaattggaacaagaaatttgttttggttcccagccattgtattcttccaaccctgagcaatagaagaactagaaaaatcttttgttctaatattcacagcgcagctccctaaccgtctgaatttcccggcacgaggacagtcttttgggaggggttgacagagagaagctgaaaactcattgttctcagatcctgaagaatgagttaataacccatcaggtgtgtgtgtgtgtgtgtgtgtgtgtgtgtgtgtgtgtgtgtgtgtgtgtgtgtgtgtgtgtgtgtgagagagagagagagagagagagagaggaagccactttcaaaaatgccctgtggttgccaggcggtggtacacctgaaggcagaggcaggcgnnnnnnnnnnnnnnnnnnnnnnnnnnnnnnnnnnnnnnnnnnnnnnnnnnnnnnnnnnnnnnnnnnnnnnnnnnnnnnnnnnnnnnnnnnnnnnnnnnnnnnnnnnnnnnnnnnnnnnnnnnnnnnnnnnnnnnnnnnnnnnnnnnnnnnnnnnnnnnnnnnnnnnnnnnnnnnnnnnnnnnnnnnnnnnnnnnnnnnnnnnnnnnnnnnnnnnnnnnnnnnnnnnnnnnnnnnnnnnnnnnnnnnnnnnnnnnnnnnnnnnnnnnnnnnnnnnnnnnnnnnnnnnnnnnnnnnnnnnnnnnnnnnnnnnnnnnnnnnnnnnnnnnnnnnnnnnnnnnnnnnnnnnnnnnnnnnnnnnnnnnnnnnnnnnnnnnnnnnnnnnnnnnnnnnnnnnnnnnnnnnnnnnnnnnnnnnnnnnnnnnnnnnnnnnnnnnnnnnnnnnnnnnnnnnnnnnnnnnnnnnnnnnnnnnnnnnnnnnnnnnnnnnnnnnnnnnnnnnnnnnnnnnnnnnnnnnnnnnnnnnnnnnnnnnnnnnnnnnnnnnnnnnnnnnnnnnnnnnnnnnnnnnnnnnnnnnnnnnnnnnnnnnnnnnnnnnnnnnnnnnnnnnnnnnnnnnnnnnnnnnnnnnnnnnnnnnnnnnnnnnnnnnnnnnnnnnnnnnnnnnnnnnnnnnnnnnnnnnnnnnnnnnnnnnnnnnnnnnnnnnnnnnnnnnnnnnnnnnnnnnnnnnnnnnnnnnnnnnnnnnnnnnnnnnnnnnnnnnnnnnnnnnnnnnnnnnnnnnnnnnnnnnnnnnnnnnnnnnnnnnnnnnnnnnnnnnnnnnnnnnnnnnnnnnnnnnnnnnnnnnnnnnnnnnnnnnnnnnnnnnnnnnnnnnnnnnnnnnnnnnnnnnnnnnnnnnnnnnnnnnnnnnnnnnnnnnnnnnnnnnnnnnnnnnnnnnnnnnnnnnnnnnnnnnnnnnnnnnnnnnnnnnnnnnnnnnnnnnnnnnnnnnnnnnnnnnnnnnnnnnnnnnnnnnnnnnnnnnnnnnnnnnnnnnnnnnnnnnnnnnnnnnnnnnnnnnnnnnnnnnnnnnnnnnnnnnnnnnnnnnnnnnnnnnnnnnnnnnnnnnnnnnnnnnnnnnnnnnnnnnnnnnnnnnnnnnnnnnnnnnnnnnnnnnnnnnnnnnnnnnnnnnnnnnnnnnnnnnnnnnnnnnnnnnnnnnnnnnnnnnnnnnnnnnnnnnnnnnnnnnnnnnnnnnnnnnnnnnnnnnnnnnnnnnnnnnnnnnnnnnnnnnnnnnnnnnnnnnnnnnnnnnnnnnnnnnnnnnnnnnnnnnnnnnnnnnnnnnnnnnnnnnnnnnnnnnnnnnnnnnnnnnnnnnnnnnnnnnnnnnnnnnnnnnnnnnnnnnnnnnnnnnnnnnnnnnnnnnnnnnnnnnnnnnnnnnnnnnnnnnnnnnnnnnnnnnnnnnnnnnnnnnnnnnnnnnnnnnnnnnnnnnnnnnnnnnnnnnnnnnnnnnnnnnnnnnnnnnnnnnnnnnnnnnnnnnnnnnnnnnnnnnnnnnnnnnnnnnnnnnnnnnnnnnnnnnnnnnnnnnnnnnnnnnnnnnnnnnnnnnnnnnnnnnnnnnnnnnnnnnnnnnnnnnnnnnnnnnnnnnnnnnnnnnnnnnnnnnnnnnnnnnnnnnnnnnnnnnnnnnnnnnnnnnnnnnnnnnnnnnnnnnnnnnnnnnnnnnnnnnnnnnnnnnnnnnnnnnnnnnnnnnnnnnnnnnnnnnnnnnnnnnnnnnnnnnnnnnnnnnnnnnnnnnnnnnnnnnnnnnnnnnnnnnnnnnnnnnnnnnnnnnnnnnnnnnnnnnnnnnnnnnnnnnnnnnnnnnnnnnnnnnnnnnnnnnnnnnnnnnnnnnnnnnnnnnnnnnnnnnnnnnnnnnnnnnnnnnnnnnnnnnnnnnnnnnnnnnnnnnnnnnnnnnnnnnnnnnnnnnnnnnnnnnnnnnnnnnnnnnnnnnnnnnnnnnnnnnnnnnnnnnnnnnnnnnnnnnnnnnnnnnnnnnnnnnnnnnnnnnnnnnnnnnnnnnnnnnnnnnnnnnnnnnnnnnnnnnnnnnnnnnnnnnnnnnnnnnnnnnnnnnnnnnnnnnnnnnnnnnnnnnnnnnnnnnnnnnnnnnnnnnnnnnnnnnnnnnnnnnnnnnnnnnnnnnnnnnnnnnnnnnnnnnnnnnnnnnnnnnnnnnnnnnnnnnnnnnnnnnnnnnnnnnnnnnnnnnnnnnnnnnnnnnnnnnnnnnnnnnnnnnnnnnnnnnnnnnnnnnnnnnnnnnnnnnnnnnnnnnnnnnnnnnnnnnnnnnnnnnnnnnnnnnnnnnnnnnnnnnnnnnnnnnnnnnnnnnnnnnnnnnnnnnnnnnnnnnnnnnnnnnnnnnnnnnnnnnnnnnnnnnnnnnnnnnnnnnnnnnnnnnnnnnnnnnnnnnnnnnnnnnnnnnnnnnnnnnnnnnnnnnnnnnnnnnnnnnnnnnnnnnnnnnnnnnnnnnnnnnnnnnnnnnnnnnnnnnnnnnnnnnnnnnnnnnnnnnnnnnnnnnnnnnnnnnnnnnnnnnnnnnnnnnnnnnnnnnnnnnnnnnnnnnnnnnnnnnnnnnnnnnnnnnnnnnnnnnnnnnnnnnnnnnnnnnnnnnnnnnnnnnnnnnnnnnnnnnnnnnnnnnnnnnnnnnnnnnnnnnnnnnnnnnnnnnnnnnnnnnnnnnnnnnnnnnnnnnnnnnnnnnnnnnnnnnnnnnnnnnnnnnnnnnnnnnnnnnnnnnnnnnnnnnnnnnnnnnnnnnnnnnnnnnnnnnnnnnnnnnnnnnnnnnnnnnnnnnnnnnnnnnnnnnnnnnnnnnnnnnnnnnnnnnnnnnnnnnnnnnnnnnnnnnnnnnnnnnnnnnnnnnnnnnnnnnnnnnnnnnnnnnnnnnnnnnnnnnnnnnnnnnnnnnnnnnnnnnnnnnnnnnnnnnnnnnnnnnnnnnnnnnnnnnnnnnnnnnnnnnnnnnnnnnnnnnnnnnnnnnnnnnnnnnnnnnnnnnnnnnnnnnnnnnnnnnnnnnnnnnnnnnnnnnnnnnnnnnnnnnnnnnnnnnnnnnnnnnnnnnnnnnnnnnnnnnnnnnnnnnnnnnnnnnnnnnnnnnnnnnnnnnnnnnnnnnnnnnnnnnnnnnnnnnnnnnnnnnnnnnnnnnnnnnnnnnnnnnnnnnnnnnnnnnnnnnnnnnnnnnnnnnnnnnnnnnnnnnnnnnnnnnnnnnnnnnnnnnnnnnnnnnnnnnnnnnnnnnnnnnnnnnnnnnnnnnnnnnnnnnnnnnnnnnnnnnnnnnnnnnnnnnnnnnnnnnnnnnnnnnnnnnnnnnnnnnnnnnnnnnnnnnnnnnnnnnnnnnnnnnnnnnnnnnnnnnnnnnnnnnnnnnnnnnnnnnnnnnnnnnnnnnnnnnnnnnnnnnnnnnnnnnnnnnnnnnnnnnnnnnnnnnnnnnnnnnnnnnnnnnnnnnnnnnnnnnnnnnnnnnnnnnnnnnnnnnnnccccccgcattccccccttcccccccccagtgctaggatcaaaggtgcatgccaccacgatgagcatttgattgctttattttatatttgtttgtttttgagacaaaattttacacagtcacccacaatgctttggaatgtatacgtagcccaggctgtcctccgccttgttgaaatcttcttacctcaccctcccatgtgctgggattgcagacctgcgccccctgctgggcaagtgactggactgcaacagaagactggacagtgtggtgcacatcactgggacttctcacctagcaggggtctgtagaaagatctgagaggacagggctggcaggagcaaggcgagagactgtgaggcccaggcactatgcgaaccagctcatgctgaggtctgagagagacaaggagacccacccccagctccatggcagctgctcagtcaggagttgaatgggaagtggggtgaagcagagaatgcagcaggtgcaatgggtgcgcactgcagttttcacagtgacagagctgtcaaacacagctgaagtggctgggaggtgatcgtgcacgaatttaatcccggcactcaggaggccgaggcagatgggtctcttgagttcgaggccaacctgatctacagagggagttataggacagctatggctatacatagaaaccctctcttggagaaacaaacaaacaatcaaacaaagcagaagtggatagaactctcaccctaaggcaagaactcaaaatcgaacttgaagtacagtgtagactagcaggagtttacagcccaagagcacagaaggggtcaatggtgcagaattactgacaggaagtcctggggataaggaggccttctggctaaaccaacccaacaggattctcatgaaaactgcaattcagagaccaacatggaaatccaaaagcatttgggaaaccgaggcaggagtgcctgaagttcaaggccagcttgggttccattgtaaattccaggacagcttgggtgaaaggggggtgggggtagagggaaccagacagattgcgtgaaggctgcggctcttgtacagaccaacaggtggcaatgttgcaccgtgtctgggttctgtctctgcagccctggaggctgaaaggcccttcagttgatgccacacattgaggtgaagggcaaaccattaagagaagccatggagccacccttcaccccctcactaccgtctctggaacaggacatacccgagcctagtttgcagctgcactaaggcttcttgttctgaacctggggccacctcgttgccggcaccctcaacctgtttgtcttttctctggttctctctctgttgctgtaaacacctggacttacagctttatataatacttggtgttcgctgtgagtgaggctcggtggtcgagtgttttctagaagctcaaggacctggactagatcgccaccctgagtaaagcacttggtgtcctggagacggctaggaggaaagatacaattgctaagccttctgggtaacacagatggaaaggaggcagggcaccctgcaggcgtgcacaagtcggttgcccatgctgttaaatatcgagggccttggtggtgtatgcgtgtgaccctcagcacacaggaggttggatagctgggactccaggctatcctggctacgtaagcaagccatgtctccaaagaacaacaacatattaaatatcttgttagtaagtagctttggacccaacagtaggttgaatgcataaaatacaaggtgctaagtgtttacataaaagttgttaaatgtgtcacctggcacatactatacagaaaaatgatctgagcaactatgtaatcagattttataacaaagcagaaaggaggttggcgggaagaggaagaagaggaggagggtgctgtccagggtacagaacttcaattctgcgggaggaatgggttgtgtgagtgttaatactgctggactcagatgtgttaagaggggtcacctctccttgtttctttaactgtaagtcaattaaagctaaaaccaaggtgagtgacgggagatgacgcagtgggtagagaagcccgctgctaagcttggcaaactgagttagcgtcccaggacctacccgctttagaaaaccaactcttgcaaattgtcttttgactgccactcaagaccagtgacatctgcatgcacataccacataaacacccccacacacacacaatgtaaaaaaaaaaaattacaaaagggggcattgtgataatacgaaggagcaagcacccgcttctacatttttaatttattattgttgttgttgttattgttgtttttgctattctgagacctggtctgctgagttcctcctcttcagcccccagagtgtggagactcttggcaggcaccaccaagcccagcttccttataaaactctttgatacctattccaagtttaactttagctagttgcagagtacttttatttactctgacaacctggtcagcttggagaccccagactctgccccagcctggcccctgggagtcctatctccaccctgactggctagtgtcctactgaccatgctgttaaaaaccacggtgcagcttctggctacaagggaggaagtgcaaacccgacagaggtctctctgcttcctccccaggcctgcagctcctgttaccccctacaaccttggcagccctggcgaacagctggctgcaagaggactgcccgggcctcaattttgcatccttggttaccgggtcggcaccctcgcaggctgtgctgtgggccaaatctcctggggttctggcagggcgacccttctttgacgccatcttcactcaactcaactgccaagtgtcctggttcctcccggagggatcgaagctggtacctgtggtcaaggtggcagaggtcaagggacctgcccaccacctgctcttgggggaacgggtggctcttaacaccctggcccgctgcagtgggattgccagcgcggcagcgacagctgtggaggtggccaggagcaccggctggactggacacgtggcgggcacgaggaagacgacacctgggttccgactggtggagaagtatgggctccaagtaggcggggcagcatgccaccgctacgacctgggagggatggtgatggtgaaagacaaccatgtagtggcggccggcagcatggaaagggtaagtgccccactgagcctctgttctcactgtggtcctccactgacaggcatttcagtccctccaccagagacctgcctggtgacaagtggtcccagcggcagggatgcctccaagtctttctgtctgtagatggaggaggctgtcttcctttttatgtgcgattcaaagcacagctctctgggccccccaggatccagggccaggctactcaaccttatcctctctctattggcctggcaggcagtgctgaaggctcggcaggcagccgggttttccctgaaggtagaggtggaatgtagcagcctgaaggaggcctttcgggcagcagaggctggggctgacctggtaatgctggacaactttaagcctgaggtgagatgggatccaacttctgggcagggccaatgggcaatgttgggatgggggtgggggtttctcacctccccctggcttctctcttacaggagctgcaccccacagcagctacacttaaagccagattccccagcgtgtcggtggaagccagtgggggcgtcacactggacaacctcacccagttctgtgggacacacattgacgtcatctcgttgggaatgctgacccaggctgctccagccctggatttttccctcaaactgtttgctgaaggagataccccagtgcctcacgctcgccggttctaaagccgaagaagatgccaccagaatggactactgcggcttgttgggcaccttgggtcacatgtctttagattcagaggccaataggacatatctaggctttttacctaggcttcccactagctctgccatctccagcttgtgtgacttgccagggctgactttgattttgcttgcctcggttttctcatctgtgaaataggtctaataaataaaatcaacagccttactgggctgttgatgataataactactacacaatgagtggttggtaaaggctagaaattaacaccgctcatctaacctaagacatatatttgttatcgaacactaaccttctggagaggtggcccctttagcagatggtgtttcaaagtaagactctggcaactggcagctgacatcacatggcctatctgtgtggctagggacacatggcaagaaacaagctgctagcacagccccaagtgctcttttctgtctctgtggtgttaaggatggagccagggccatggacaagtgtcctagcgctgctgacctcagccctctctcttctctcccttctcccttctttcctgtctcccccattcctgctctgcctcaccatgtagcctaggctggccgtgaacttctggccttaggtgtgctcctgactcggctgcttgcactgtgctctctgcacctggcttacaacaactctttccacacatgtacactagaagccatgagtagtaataagacattagaaatgcgtggcacttctttgttgttgttgttgttgtttttcgagacagggtttgtctgtatagccctggttgtcctggaactcactctgtagaccaggctggcctcgaactcagaaatctgcctgcctctgcctcccaagtgctgggattaaaggcgtgcgccaccactgccctgcatggcacctctttataccaggaaggatcttatatttgaaggggtgtggtatcagatttgccatccggctgggacatttccctgactgatgtctgaggagctaccctgacctcgtctaagcctagatcctagggcagatccaggaggaacatgtccatgacaggtcctaggtgctggcggtcccaggagctccctctgcctctcagagcccacttctcccccttggccacaaggagaggatacattcagctcttggccacaaagaccctatgtcctacctggtgtcgcttagtggggaggtgtgaaggcaaacactaagcccactgcacagtccagagcccaatagactgaggcctgctttattcatggccctgcccttggagggtggtgcatcaggaagtgaagatgtacttggcagagatcctggacagagccggccaatattctgaaccaagggggccattctcatggacacagcctgaatgtgtcacatgggatagtacccattgtctctcacccattcctggtccccattcttcctgcaggggcagcatggatgctcttagcaaagtggactaactccagagacctttggtctttaaaagccccaactccttacttttgaagaaggaaaacggagtccctgcagaactgggcactgctgggtaccagtgcaggaaatgtgagcccggaggaggaggggtgaggggaggcacgggagctctggtaaccagaaagtcctaaatctgggatttcgggtggtatcaggggcagcagtgagaattaagctttaggagacccaaactcatgtgctggaatctaaaattagggggtgagtccggagcagacagaggggagtggactgcactgagggggagcatgaatcccacacatgtctcttccacaggattgctgttactgcttttagatgtaaggtctcattagctcacatagtctctgctggcctggacctcactgtgtagccaaggctgtctttgagctactagtccctaaaccttcacatcccaagtgctgggaaaccagcagaagccactatgcctggcgagtgttgcaattatttcttaaggactctgtcaggctgaattttaaggtcaattttgaactcagaaatggatagacccttccaggattctctgaactctgtgaactgggaagggattctattactggaggaaagcaagtaagactccaggcaagccaaagtagcacttgctctcctcatagcagagagggaggtgccgggtttccaggcagaggcaactgcatgggcagaggcccagaggaaggtaatggcttgcattgtgtgctgaattggttgacgctgggccctggaaaacaagatgactaggggataggctggctccagaccacaaaatggtaggtcagaggatttggactgggtcccaagaacaatcggattcaagctagaaaataagccaacgcagattcggtcccctgaagaaggatgcaggcggagaaaagccgggtggctgcagggaggtgaagggatgctgcctggggaggcttggatgagggtcttgccagtgaagcaggcaccagtgtgggtagagcagtggtcctcaaccttccaactgctgtgaccctttaatgcagttccctgtgttgtggtgatccccaatataaaattattcttgtcgctacttcataactgtaattttattatcgttaggaatctatgcaggatatctgatgtgggacccctgtgaaaggggtccttgtgggttattcaaaccccaaaggtgtcataacccacaggctgagaactgctagagtagaggctagactcttttggaggtctcagggggcagagagaagacatggcagaagaggagtgtcccctttcactgggtggtgggtttcctgttcagcctggggctacggttagagcacttctcaaggctgccccatgcccagtgcgaaacccatttgacaactggccgaattgactggatgagtgaaggtgactactgccatcctctgtgacatcatcagtgcacctggaggatgagaagggtcccatccctcagttaatgatgggggaggggcgaggtatcaacatctccgtgttacccacaaggaaactggcttacggagccaagagcatcgctggaggttacatatcaacacggtggtggggcagcattcggaggcgttcttcactccttccgtggatgtctggcactactcaaaacagacagggagacttgtccttatggcgatgtgtctgggtccggggttggggcggagtccagaagaacaatggaaaagcagttcaggaaaattcataaaaatggccttatgaccaccagagggcaatgtaaccccatggcttgatttccaccctcttggggattcaaaaagacaataggccaggtggccaggaatacaaagtgcagcagctgttccggaagacagggctagagctgctggagctgtttgtttgtgttcacagcactcaccaggcagagccggaggattgccagttcgaggccagtcaggtctatatagttaagcctggactgcagactggaaccctctttcagaggagaagaaagccagggctgggcctagtgcctcaagtctataatcctagtacctgagaaactgaggcaggagaatcacattttggaggccaaaacgggctgcatagaccttgtctcaaaaaagtaagaacaaaacaaagagacttcactcaggaaggagtagaaagctaggggaatccttccaccgacttgccagcccagtcttgtcatcagatattcaccccaatgtcgaaggtaacctagtgctgtgctaagcccagcttgggtggcaacctcattcacacacaggcccatctgctctcctactcacctacctacactgccatctagtgaaccctgtcccaccgttcaacctagtcaccaacagaagctaagttaggccagagcagggaggtgttccttcaaggacagcaagagctcaaactgaagctgagagagattgcttccatgcccaggagtcccgtgccaaggccacggaagggaggaggcatttaaagccatcaggacctcttagcaagccagaacatttctggaaaccatcttgcgtttaaaaaaagatctctctgttgtgttgatggagcagacacacattatttatcacttgctctggaaggaggtaaacatctccaactgctgctgcatcccctggctttgttcctgtggtgtcccgagtgatcgatcattgtagacagctcccaatatttcagctctgaagccttgggtaactcagttctgtgaggccagattctgaactacagaaaaatctcatcactggatcattggtaaatttgcacccacccctgcgcatagcaggcttcttctgatggtgagggcagtctttaacatgttccagtcggtggaaactggcagagcccttaaaggaaccatcgggtgaggggatcatcctgatgtagctctagtgtggtgggccctgggcagcctctttctctagtgcttcagttaaaagattcaggagtcctacagagcagccccagacccagcatggtagagtttcaagaggctgaggccaaaggatcaatgctggcctggattatagaaagagccagtcctaagaaaacaagagctggaatgtagctcagtggcagagtacatcccgagggacatacacacatacgatgtacatacatacgtacatacacacacacagtggacatacagatgtgtatacacatggtgaacatacatatgggcagacaaaacatccgtacacatagaatataataattaaaaacaaagcaatcaacaacaacagcaaaaaccccagtgttttgctttgtgggtatgtatataaaccttgcatgcctggtgcctgtggaggtcagaggtcagatgccctggagctgaaactacagactgtggtaaggaaccatgtgggtgctgggaactgaacccaggtcctctggaagagcacccaatgctcctaacttgggagccattgctccagcccctcaagctggatccttgactataacacggaaatggatttcatggcaagccagaatgaagttatgttatcagatttattaagataagggtaagggaaagtttgatggtgcatatctttagcccctgcactcaggagacagaggcagggggaatctgttagtgtgaggcaagccgggactacatagtaagaccttgtctcaaaaaaaaagataagaaatattatgcattctgtgtttaaatctgagctttgagaggaagagggagagaacagagagacaacaactcagagacaaagagactgagagatttaaaggagaacactatacacttaagtcttgagacccagagagcttttcactttggtgtctttacagatagggttttgtgatttttttttccaagttataattattcaaaggttgtcatttcaaaaaagaatcacaacttcccaccatatgtgttccagggttaaatgcagattatcaggcttggtggcggtgcccttagcagtggaatgattttatgtctctagcttggttttttgtttgtttgttctgtgttattttgagacaaagtctcactgtatagccctggctgacccgaaacccactacgtagagcaagcctgcctcagactcagagtgacttgcttggttctgcctctcgagtgcaggaattaaaggcatgccccaccaccactgtgccacccggctggcttgttgcttttagcaacctcactggaaacctctgtaggaagacagatgtcaccgctgtggctagttttaccccagactcagggcctctattccctcctagtccctgtaattttcatctttctgtttttgcttcattgtatacaatgctgatgattgaattaagctctgcacacatcgatttacatggttactgatttcttctgtctgactccaatttttcaccctttagccacagctcccatctctccctaaccccaagctgagaagctgagatgtcctctctcctcccttctgcctctgtgagccaggttgtttctgctggaaatcagtctctagaaatgaggtcgtggctgcagcctctctgcctaggtgcttgatgctttgcaaatattgaccccttatcaaatgctgcttgcaaatattttctcccaactctatattgtctcttcattctgcctccttatgcctgctaatcttatattgcttgtcagataaacaccagacctacacaggattcttatgataatgatatctttatgataaggagtggacatcctgtctccagttagtcatgcctgttactgggacaagcaaggtcttcctgagtagtttacctcctttcatgacctctgagtgttctaatctggcaggagctgccctggctttgtgtcagtcctggcactggcttggttaatcctgcaggtggctctttccctggccttgagtagcttgctttcatgtacacacacacacacacacacacacacttgattccttgccgagcagttgagagaaatcctctaacaactggggttccaggcttctcagctctttcctctggaaccatctccaagcctctgcctcagtctctcctctctcagctctctctctcctgctcagggtcctctaggcagctcctcacaaacctgcttgctttctctctggaatcttgttgctctcctcattcgttgcctgtggtctgttgcttcctgagtttttgtggcttcgcggtggtggctgcagaaacccaactactgatgctccattctgccccgaaactggagtcccagattccaggagtgaaattgcagatgattccagagtgctctccaggtgaacgccacagacacactgtctttcctgcctcaaaagcttttctccaagctgacagtggtggctcagcactcaggaggcagaggcaggtggatctctgaggttgaggccagcctggtctacagagtgagttccaggacagacagaggtacatagggaaactatgtaactctggctgtcctggagctcactaggcagatatgcagaccaggctgcccttgaacacccaaaaatctgctggcctctgcctctcgtgtgtgtgtcaccatgcccaactatttcctcctattaaaaaccattttgctttatatcataaaacgtgttgaaaatatttcttcttgaactcagtctcccaatgccaattttaccattaaattttttgcagtcattataatttctagaaccttttttggttctagatgtctttcttggcatttgagtaggttgcctgacgttcaggaagttgtgtcatttggttaagatgccccatttcgatcagtggctcctgctccctcccctgccaggaggacatttggcagtgtcacactgtcacagctaagaggatgctattggctcctagctggtagagatgctttgaaataccaagaaagcttgtcacaaggaacaattatctgtctcaacatgtctctagtgcaaaagtggaggatagtgatctgagagcggctgccccgactgtgaccactaaacgccaagacaaggggctctgaccatccatccactctgaagtctttccagacaaattgttcagctttgactggtgatggacatgatccatatggccaagatttattccatttagatcttagaggtaaagatttataaacatttaagaaattattgttttatcttattttacctaaaaatctatttttgtcttctcctagaaaagtcagagagatgagctggcacatgcctataattccagcactcaggagatggaggtaggacaggagggtcaagagttagaggccagactgggacacatcttgaggagcaggagaaaggttgggagacattcagtaatgtacttctgtacacacgtggggacctgagttcagatccctaacattcgcctaaaagtcaggtatgcgggcgtacgtcctttaaccctagcattggagagggggagacaggtgggtctcagaagctcactggccagccagccagccaattggagaacccaagttcagtgagagaccctgcctcaaaaaatgaagtagagagtggttaaaagagacatgccatccacctccaacctatacacatctacacacacgcatttgcatctacacacttatatgcactgattcacacaaacaggggcatagttaaaaagacagagggggggagtgtttactgaggtttaggggtgagcatttcagcaggctcagtttagatacgtggtggttagcactgatcacttgacaggatctagaaccatcatgaagataaacatctgggcatgtcgatattggcgttctaactgggttaagtgaggtaggaagagtcaccctagctatgggtagcacttgggctcaacaaaaaggaacaagtgaactgaaaaccaacttccactgatctctgcttcctggctgtcttagtcactgttctattgctgtgggagagacatcatgagcaaggcaactcgggaaagaaagcatttagttgggggctttcttatagtttcagaggtaagtccatggccaccgtggcagggagcatggaggtaggcaggtaggtatggtgctggaaaagaggctgagagctatttttttgttgttgttttttgtttcttgttttttttttcaaggcagggtttctctgtgtagctctggctgtcctggaactcactttgtagaccgggctggcctcaaactcagaaatctgcctgcttctgcctcctgagtactgggattaaaggcgtgcgccaccatgcctggcctgaggctgagagtttatatttgatccacagacacaaggcagagatttcgaaattcctgaatggcctgggcttttgaaatcttatcacccagccccagtgacacacctcctccaaggctacacctcctccaaggtcacacctcctaatccttcccaaacagtccacccactgagaaccagacattcaaatagatgtgcctatggtggctctcattcaaatgccacactgactttgggttaaatgtgagcagctacttgtgttcaatgccacactttccacaccctcaagctgggagctgaaataaaccctccatcctttaagtagtttttacctggtattttgccacactgatcagaccaacacaagatacaatgtggaaaaaaggagacaggaaggtaactaggtaccgtccagtgaattgtgaatgacctcaggaagtgtgggtgccatacagccagaactcaggaggagggtagggacagaagtgggcagaatatggatcgtttgggatggttgggggtggggcgagaggaaagcttccctgagtgtgtggaggagataattgtgagggagtggctaggtctatcaagggagctcttgagtttgagagacctgagtgtatggtccctcatggaagggaaaggatgactgaaggaacacgaagcatttagttaaggcataggtttgacttcaggttacaaacatccacagtggtagtgatatatataaaataaaacgttgggctttaacatgcactagcactaggtaggcaattctgggctggtgtggtctttcatagaccgtccagttcctccgctctaactgttcagctgtccctaagatatcattgcccgcagcagtgatgttccataccatgtctgaattctagcccagttacatagccatgcttagctaccagggattctggggagtggggccttcttttgggtggccatgaagccagttacaaaccatactggtgttcctgctgaataagagaatagatatatggggaccatatctgctgcagctggaggtagaaactctgggatcattcaggcaaaggcagctgaagttgaagctctgggtaaaactgactgggaagagcgtgtggagacagagaagggttagtcaggtctgatccctaaaaaagaagacaggatgggggggggggtaccatagggttacagaagctgagggaagaaggttcaagactgaaaatacaactaatgcccagatggggagattgttcagtgggtgagacggcaggaaggctgtgaactcaacatgttcaaataccaaaggtttgcctggagtgatggcagtccagtgactgagctgcagggtgctctttcggagcacccaggttccatttctagcacccacccagtagtggatcactgcacctctaactcgagtcctaggggaatctgacgccctcttctggcttctgtgggcactgcacacaggtgtacacaaacatgtgtgctggtagaacaggtgtatacataaaataaaacttaaaaaaaaaatgaagtggagagggccaatgagatggatcagtggaaaaaggcacctgttgccagccctgataacctgagtccaattccaagaacttacacggcagaaagtaaccaactcctgtaagctgtcctctgacgttcacatgcatggtgtgtgtgtgtgtgtgtgtgtgtgtgtgtgtgtgtgtgctgaatcagacagaccgtgttctaggaaaatagttggcggaaacgactgacctccacatattacgtgtgtgtctgacattccaatatttgggaaaatcaggcagggggactggtagttagacagaccagcccgggctacataacatgactttgtcttaaaaaccaaacaagggctagagagacacctcaggaggtaagagtgtgttctgttcttgcagagaaatcaggtttagttctcagtatccacatggtagctcacaaccatctgtaaacatacatgtggcacacatatgtaaatacagtcaaaactcccacacacaaaataaaatagataaatctaaaaaagaaattaaaacaaatccaaacaagaaccccaccaaactggtattcctcccatggaacctccccgactcctgagaattgtctctggcttttacttggt

SEQ ID NO: 446 - DNA, 2010 bp, Mus musculus
tgattctggggttcgcagtggggctggctcagcgagggtccaaagaggtgtaccgtgagggctcttaggaaggactgacccagctcggcccctccctcccctctctctggcagccccacccccagcctcagcttctgggaacattcgacctgaactgtggtgaacacactgacccgctggctgctccaagtcaccatggaccctgaaggcctgcagctcctgttaccccctacaaccttggcagccctggcgaacagctggctgcaagaggactgcccgggcctcaattttgcatccttggttaccgggtcggcaccctcgcaggctgtgctgtgggccaaatctcctggggttctggcagggcgacccttctttgacgccatcttcactcaactcaactgccaagtgtcctggttcctcccggagggatcgaagctggtacctgtggtcaaggtggcagaggtcaagggacctgcccaccacctgctcttgggggaacgggtggctcttaacaccctggcccgctgcagtgggattgccagcgcggcagcgacagctgtggaggtggccaggagcaccggctggactggacacgtggcgggcacgaggaagacgacacctgggttccgactggtggagaagtatgggctccaagtaggcggggcagcatgccaccgctacgacctgggagggatggtgatggtgaaagacaaccatgtagtggcggccggcagcatggaaagggcagtgctgaaggctcggcaggcagccgggttttccctgaaggtagaggtggaatgtagcagcctgaaggaggcctttcgggcagcagaggctggggctgacctggtaatgctggacaactttaagcctgaggagctgcaccccacagcagctacacttaaagccagattccccagcgtgtcggtggaagccagtgggggcgtcacactggacaacctcacccagttctgtgggacacacattgacgtcatctcgttgggaatgctgacccaggctgctccagccctggatttttccctcaaactgtttgctgaaggagataccccagtgcctcacgctcgccggttctaaagccgaagaagatgccaccagaatggactactgcggcttgttgggcaccttgggtcacatgtctttagattcagaggccaataggacatatctaggctttttacctaggcttcccactagctctgccatctccagcttgtgtgacttgccagggctgactttgattttgcttgcctcggttttctcatctgtgaaataggtctaataaataaaatcaacagccttactgggctgttgatgataataactactacacaatgagtggttggtaaaggctagaaattaacaccgctcatctaacctaagacatatatttgttatcgaacactaaccttctggagaggtggcccctttagcagatggtgtttcaaagtaagactctggcaactggcagctgacatcacatggcctatctgtgtggctagggacacatggcaagaaacaagctgctagcacagccccaagtgctcttttctgtctctgtggtgttaaggatggagccagggccatggacaagtgtcctagcgctgctgacctcagccctctctcttctctcccttctcccttctttcctgtctcccccattcctgctctgcctcaccatgtagcctaggctggccgtgaacttctggccttaggtgtgctcctgactcggctgcttgcactgtgctctctgcacctggcttacaacaactctttccacacatgtacactagaagccatgagtagtaataagacattagaaatgcgtggcacttctttgttgttgttgttgttgtttttcgagacagggtttgtctgtatagccctggttgtcctggaactcactctgtagaccaggctggcctcgaactcagaaatctgcctgcctctgcctcccaagtgctgggattaaaggcgtgcgccaccactgcc

SEQ ID NO: 447 - protein, 307 aa, Mus musculus
TVVNTLTRWLLQVTMDPEGLQLLLPPTTLAANSWLQEDCPQFASLVTGSAPSQAVLWAKSPGVLAGRPFFDAIFTQLNCQVSWFLPEGSKLVPVVKVAEVKGPAHHLLLGERVNTLARCSGIASAAATAVEVARSTGWTGHVAGTRKTTPGFRLVEKYGLQVGGAACHRYDLGGMVMVKDNHVVAAGSMERAVLKARQAAGFSLKVEVECSSLKEAFRAAEAGADLVMLDNFKPEELHPTAATLKARFPSVSVEASGGVTLDNLTQFCGTHIDVISLGMLTQAAPALDFSLKLFAEGDTPVPHARRF

SEQ ID NO: 448 - DNA, 38538 bp, Homo sapiens
  misc_feature (1)...(38538): n = A,T,C or G
agtaaacatttatatatatattttttaaagtggagcagttcaatatagagtcttttttgaacaaacgtgaaatagatgtcttttttttttttttgagatggagttttcactcttgttacccaggctggagtgcaatggcgtgatcttggctcaccagaacctccgcctcctgggttcaaacaattctcctgcctcagcctcccaggtagctgggattacaggcatgcaccaccaaacccggataattttgtatttttagtagagatggggtttcaccatgttggtcaagctggtcttgaactcccgacctctgctgatccgtatgcctcggcctcccaaagtgctgggattacatgcgtgagccaccgtgcccgacaatagatgtcttttaattttctggaggaaaaagcaaagcaaaagaagcagtggatattttaagactaaaaaggaaaacaaaaaaaggagatagagcaggccagacgtggtggctcaacgtctgtaatcccagcactttgggaggccgaggcaggtggatcacctgaggtcaggagttcaagaccagcctgaccaacatggtgaaaccctgtttcaaaatacaaaaaattagctgggcgtggtggcgggcacctgtaatcccagctacttgggaggctgaggcaggagaatcccttgaacccaggaggtggaggttgcagtgagccgagatcacgccattgcactccagcctgggcgacaagtaaaaaactccatctcaaaaaaaaaaaaaggagatagagcaaggaacagtaagaaaatagttgggtgcagtggctatgcggtggcactataggaggctgaggcgggcagatcacctgaggtcaggagttggagaccagcctgggcaacatagacccctatctctacaaaaaatttgaaatatgaaaaattagccaggtgtagtggtgtgcgcctgtggtaccagctactcaagaggcgaaggcagggaagattgcttgagcccaggagtttgaggctatagtgagctgtgatcatgccactgcactccagcctgggcaatagtgtgagactctgtctcaaaagaaagaacatggccaggcgtggtggctcacacctgtaatcccagcactttgggaggccgaggcagtcagatcatgaggccagtttgaaaccagcctggccaacatggtgaaaccctgtctctactaaaaatacaaaaattagccaggcgtggtggcatgcccccgtaatcccagctacttgggggtctgaggcagaagaattgcttgaaaccgggaggcagaggttgcagtgagccgagatcgtgtcattgcactctagtctgggcgacagagcaagactccgtcttggaaaaaaatttaaaaaaagaaaatataaaatatggtataagattaaatatattagttatgaaaataattgtaaatggcttattgaacttatagtcagtaaaaatcatgtttttgaaaattatgtaatgactttggaaaataccagcaatataatgttaagtggggaaaaaagcaagttactcctctgtaatacatatgattttagttttgtaataaaaattcccaaccatatatgcacttatagggaaacaaaggacccatcgcaaatgttttccatgctgatctccaaagtggtgagtttatgtgtgatttttattttgtttatgctcttctgtattttccgaatttcatacaataaatatctgttacttttacaatatgaaaaaatagtggtcaaaaaggtgttcaagggggtggcctgggggtgtctggtttgaggagagtggtaggggatgaggctgcaagtggaggttggagccatgctatgaaaagttcaagagtttgaattgagttctgaggtttgtttttgtttttgtttttgttttttgagacggagtctcaccctgtcacccaggctggagtgcagtggcacgggttcatgccattctcctgcctcagcctcctgagtagctggaaccacacgcgcccgccaccacaccaggctaatttttttgtatttttaggagagacagggtttcaccatgttagccaggatggtctcgatctcctgacctcgtgatccacctgcctcggcctcccaaagtgctgggattacaggcgtgagccacagtgctctgcgtgagccatagtgctctgctgagagtttgaattgcattctggaagtagtggtgaaatcaacacacctaagtctgctcttctcctctcttctagtccccagagtggtgagtagcatcgttctggtggcccaggcaaaacgccttaggaccaccgtgcagccccactctttccccattcctgctctccaggtgccaagtccctggctcttcttccaccgacccttgcatcccttccttctcttcagtcctcatcgcacctcaccgggatcctattgacacttcccctttgatttccttccgctctctgctagtgatggtcccagggacccttctaaaaggtcactgtgggctgggcacagtggctcacgcctgtaatcccaacactttgagaggctgaggtgggccaatcatctgaggtcaggagttcgagaccagcctggccaacatggtgaaaccccatctctactgaaagtacaaaaattagccgggcgtggtggtgtgcacctgtagtcccagctactcgggaggctgaggcgggggaattgttggtccccgggagatggaggttgcagtgagccaagatcgcgccgttgcactccagcctgggtgacagaatgagactccgtctcaaaaaaaaaaaaaaaagaaaaaagaaaaatagctgggcatcgtggcacacacctgtagttccagctactcaggaggatgaggtaggaagatcacttgagcccaagaggtccagactgcagcgagtcatgatcacaccactgcactccagcctgcgtggcaccctgtctcaaaatataataataataaaatttaaaaataaaataaaacgctgctctgtctaggtgatattcctctatccccaaggctgtcagggtggaaccctccttccttagcgtggcatataagcccctcgggacctggccctatctctcctctgaccacccctgcccggtcagcccttgttacagacagtctgtgctatccagccccatcaaattcctgttgctccctaaatatgccacacactttatttggaggagaggggtgaagaagggtagtttaacatgttcaaaatatttattttttccagacagtaaaataacattttttcctgttttgcaaaagttaattatcagcacattgaagattttccttttttttcttttctttttttttttttttttgagtcaaagtcttgctctgttccccaggctagagtgcagtagcgcgatctcggctccacctcccgggttcaagtgattatcctgtttcagcctcccgagtagctgggactacaagcacatgccaccatgcccagctaatttttgtatttttggtagagacggggtttcacaatgttggccaggctggtcttgaactcctgacctcaggtgattcacccgcctcaccctcccaaagtgttgggattacaggcatgagccactgcgcccggccagcagtcttaaataacagaattcacacacacacacacacacacacacacacacacacacacgcactgtattatatttcatcttatactttaaaatgtttccttttttttcctcaaaagtacacattaagatcatgtttacaaataaagccttgtcatccaaagtgaaaaatccagatggcaagatttggatggggaaggtcttgagaaatctgcgaatggagttcacttttgcagacaggaaatgggccctaatatatggttctaaggacattccatttctgaaaatgtacatttccacccgcttttcctctccttccttcctccctccctccctccctctctctctctctctctctctctttctttctttctgacaaggtcttcctctgtcgctgacgctggagtgcaatggtgcgatctcggcccattgcaacctccgcctcctgggctcaagtgatcctcccccctcagcctcccaagtagctgggaccacaggcacacgccacggcacccagctaatttttgtattttttgtacagatgggttctcaccatgttgcctaggctgatcttgaactgctgggctcaagtgatcctcccgcctcagcctctcaaaagtgctgggattacaggcgtgagccaccgcacctggcctgcatccccatttctgacccttgaccatgttcaagtgggaaggggaagccggggaagggaggacgggctacctgagggctgcgggtagaggtgactcctgtgagctgtgagccctcagcccttgggcagagggaacagaacagaaacagaccccatctctgagccaccaagctcagactcgtgtggcaggagacagatcacacaacactatcaacaaaacaacacaggtcgcagtggctcacacctgtaatcccagcactttgggaagctgaggtgagaggattgcttaaccgcaggagttcgagaccagtctggccaacatagcgagaccccatctctcaaaaaaagaaaaaaattagctgggcctggtgatgcacacctgtagtcccagctacttgggaggctgaggtgggaggacagcttgaaccagagaggtcgaggctgcagtgagctatgattgtgccactgccactgcactctagtctgagcaatagagtgagaccctgtcttccaaaaaaaaaaaaaaagagagagagagagagaagaatataatcaaaagtttctaaattcccaaagtagtaacaaaagcagacccaaacaaaagtagagagaaaatcttcgaaacttaaaaggctatttaggctaaggagcccacccagtggtgaccacctagttctgggaggtttggggcagggccattagacaatggaaactcaggttattttggagacaatcaacttgctcccaaaaatgagctgcaagcaggtgcctgtgtgctcagcccagtctggagctcagagcctgcctgccccactgcaccatcaccagcccagctgaaccagggtcccaggcaagccgtacaggctctgcgttggccttggagagaaccgccgactcccccgagttgcctgagctcggcctgaagccagccctccccacgctggctcacaataaatgccttgacttcccgccaactcttcctcaaccattaagattcagctcaactgtcacgggctctgtgcagctgccctcgctgccccaccccacgcagactttgtgttccttctccactcctgcagcaccccttgcgacagcatgaataacccggctgtagtgatgtgagggtgacactcatcaccagtgtgtgagcccctccaaggccacatgtcctctttgtgtttccagagcccagggcccagcatgcggtagctacctagtatatgtttactgaatggagggatgaataaattcatgcacaaagaatagttttatttatttatttatttttgagacagagtcttgcttctgacacccaggctgtagcgcagtggtgcgatcttggctcattgcaacctctgcctcccaggttcaagcaattctcctgtctcagcctcccaagtagctgggattacaggcatgcgcgccaccacgcccggctaattttctatttttagtagagacgaggtttcaacatgttggccaggctggtctcgaactcgcgacctcaggtgatctgcctgccttggtcttccaaagtgctgggattacaggtatgagccaccgcgcctggccttatttgtttattttcataaacaaatttctgttgcccaggctggtctcaaactcctggcctcaagtgatcctcctgcctcagcctcccaaactgttgggattacaggcacaagccacagtgcctggcccagttctgtcctttgagttgacctggtcatccaggaggatgttctgaggaagtgtgaaatgataatattattctagcccacgctggatacagtggcagtctggaaggtgaaagaggttgggtttgaaatagatttattggccaagtgcagtggctcacacctgtaatcccagcactttgggaggccgaggcaggagaattgcttcagcctttaaacatggcgaaaccctgtccctattaaaaataaaaaagttcgatgggcgtggtggcattcacctgtagtcccagctactcaggagggtgaggcaggagaatcacttcagccctataggttgaggctgctttgtgctgtgatcatgccaatgcacgctagcctgggtgacacagtgagaccctgtttcaaaaacaaaaacaaaaacagaatagaggcctggagcttgagagggaactcaggatagaagatatagatttaagagtcggctggatgcagtggctcaaggctgtaatcccagcactttgggaggctagggtgggtgtatcacttgaggtcaggagttcgagaccagcctgaacaacatggcgaaaccccatctctaccaaaaataacaaaaactagctgggcatggtggcatgcgcctgtaatcccagctacttgggaggctaaggcaggagaatcacttgaacccgggaggtggaggttgcagttagccgagattgtaccactggattccagcctgggtgacacagtgagactccctctcaaaaaataaaaataaaaataaataaataaataaataaatagtgatacagatagatagatacataaattatatcattcactgggtagattgagaagagagctgtagagagaatctgagtgtaatagtcagggcaggctaactgctgtaagaaacagtgcccccacatctcagtggtataactcaaaagaagttttttccttcttatgacagtcaattcctgacatctggagcatgacctttcacaacattattccgggacccagtctccttccatctagtggctctgtcatcctcctagggccttggagtggtctgcttttgaccagctaatgggaggggagaggcagaataggatcctgtgaagacttctagggtcaggtctggaaatatcttttgctcacactccattggccagaacaagactgcctcagtgcagaggaagctgggaaatgtagtttagtagggtacccagaaggaaaagggaaacagtctctgccacactgaagcaacaccaaaatctgagggttggatgtaggaagaagcacctgcaaaagatagaaaagagcctttaagaggatcacctgaagccaggagtttgagaccagcctgggcagcatagcaagatcctatctgtacaaaaaataaaaataaaaaattagcctagggtggaggcatgcacatacagtcccagcaactcaggaggcttggggccaggagtttgaggctgcagtgagctttgattgggccactgcactccacttaagcctgagtgacagagcaaaaccctgtatccaaaaaaaaaaaaattaaccaggagaaaaatgacatttggagatcctgtctctaaagaaaaaaaaagctcactgcatagctcactgcagcctcagaaacaggcccaggactgaatcaaggccagcaaggtgctggggtgataagcgagcccgactccagcctggccaacacggtgaaaccccttctctactaaaaatacacaaattagctgggcatggtggcagacgcctgtggttccagctactcaggaggctgaggtaggaggatcacttgagcctggggcgtggaggttgtagtgggccaagattgtgccactgcactccagcctgggtgacagagcaagaccctgtctcaaaaaaaaaaaaaaaaaaaaaagtgagctggaggatgaggcctccctaaattttgtgccttgggtgtctcgatccgtcacgccagccccagtcccggcagtcaggtgcggcagagaaagcaaagggagaaggctgggaagatgcaagtgaatttagcgactagcagtccctgtgagcaactgtagcaagaagggtttccaatgaagaaaggaaggccctgggccaggcgcggtggctcatgcctgtaatcccagctctttgggaggcagaggcgggtggatcacctgaggtcgggagctcaagactagcctgaccaacatagagaaaccccgtctctactgaaaaaaaatacaaaattagccgggtgtggtggcgcatgcctgtaatcccagctattcgggaggctgaggcaggagaatcgcttgaccccgggaagcggaggttgcagtgagtcgagatcacgccattgcgctccagcctcggcaacaagagcgaaactccatcaaaaaaaaaaaaaaaaggaagaaagaaaggccctggcagttcttggacaggaacttgcctgaagtcccagtcccggtgactggtggtttccccactttctggttcagaagctgggctctaagctgtctgtgcccttaaagttccttggaaagagggaagggaagggaagtggatattaggtgagttcctactctgtttcatttgcagagttttctcattgattctcagttggacccatgaggtagatgttatgccattacattttttttttctttagagacagggtctctctctgtcactcaggctggactgcagtggcacgatcacggctcactgcagctttgaactcctgggctcaagtgatcctcccatctcagcctacaggtgtgcaccactgtacttagctaatttctttttcttttttctttttttgggagagatgggatctctgtatgtctctatgatgcccacactggtctcaaactcctggcctcaagcgattctcctgccttggcctcccaaagcacagggattacaggcatgagtcgctgtgcccagcctgttatgccgggtttttttgttttgttttgttttttgagacagagtctcgctctgtcgcccaggagtacagtggcatgatcttggctcactgcaagctccacctcccgggttcacaccattctcctgcctcagcctcccgagtagctgggactacaggcgcccaccaccacacccggctaattttttggttttttagtagagacggggtttcaccatgttagctgggatggtctcgatctcctgacctcgtgatctgcctgcctcagcctcccaaagtgctgggattacagtcgtgaaccactgcatccggcctgttatgccgttttttaaattaattaataaatttatttatttatcttgagacagagtctcactctgtcacccaggctggagtgcagtggcatgatctcgactcactgcaacctccacctccggggttcaagtgaatctcatgcctcagcctcctgagcagctgggattacaggcggccgccaccatgcccggctaatttttgtatttttagtagagatggggtttcgccatgttggccaggctggtctcaaactcctgacctcaggtgatcaacctgcctctgcctcccaaagtgctgggattacaggcgtgagctcctgtgcccggccctgttatgccattttaaagctaaggaaactgaggcacagaaaaaggtaaaaaggtacttgagatcaaaaaggatggagttaggatttgaacccaggtccagggcccatgattttcccagcacaccatccaaaatgcctgcctgccctcaccagggagcacatgcttacattcacagccttggaccctgggttagggccaggagggctgggtgttgggtgagaacagggcctcgggctccttcactggctggggcagggcttctgagttccccatcagagcccctcctctgactttcagggcctgctgaggaatctgcaggcctggcagaggacaggagggaggcttggggagcctgggaagggccggctgacagcttgatgggccctccctccctccacagtcccacccccagcctggggcctctgggagccttggtcctgagcagccaacacaccagcccagacagctgcaagtcaccatggacgctgaaggtaaagggacactctctctgccatgtccctgcacccatccccccactgcctacccctgcccccaccctggcttgtctcagccccttgttgcctcctctggagtcatctctcctctggtcccgccatcgactcccttacctaccccatgtccctgcagccttgctcaacccccagaggccccttctcactcttctttctcctgtgttgagtccccaaggagctctggggaaggaaggggcttaagccctagaaaagggcagggtggcctggaggaggtggcgtctcctgggggcagtgggggccggaagtgggaggctggttgggggagcagcatggacttctgctctcgctggtagctcgggagaagcagagacaaagtcctgtcccttctgcagctgggtgggggagggggcttgagtcccgtgattccctgcctggagggagctgtatgcaaactgttggggtgatcagtcccaacccccaaccatgaagtccggtggcaacaaaggaatgagaaaagacaagttaagatttaaagcagccccagggggccagttgctaaagtgaaggctgcagagccctggttgcctgataatttattgagtacaatcttttgatctaagaagcagatggtacggggtgaaacggtgaaggtgggggtgtgtgcgtcatttgaaagatgtatagccgtggtggtttatgtgaatttcctttaagctcaaagcatatgtctaactactaagataatcttttttttttttttttttgagacggagtctcgctttcccccaggctggagtgcagtggcgtgatctcggctcactgcaagctccgcctcccgggttcatgccattctcctgcctcagcctcccgagtagctgggactacaggcgcccgccgccacgcctggctaattttttgtatttttagtagagacggggtttcaccatgttagccaggatggtctcatttcccaacctcgtgatccgcccgtctctgcctcccaaagtgctgggattacaggtgttagccaccgtgcccggccaactaagataatctttaacttattgggctgcagctggtgggagtgggttttacaaggagccaggatgtctggtcacattccaacgcttcaaggaagtgtttcagcccagagcattctgtgtaaagccgcagagcaggtcatgttcactggcctggggacacaatggcaataaggaggtgattctcctcagaggccccctatggtgttccataggtgtcctacacaggggtggctgactaaactggcgccccgtaaacccttccaccagcacaaacccaggggtccatgctctacgctcagaaggctccaccagggatggggctgtgtgaccatgggtgggtcctggcttctcagagtcccgttttcttccatctgtaaaatgacaataatagttccctgctctggcccgccacggtggctcacgcctgtaatcccagcactttgggaggctgaggtgggtggagcacttgaggtcaggtgtttgagaccagcctggccaacatggtgaaaccccgtctctactaaaagtacaaaaattagccgagtgtggtggtgcgcacctgtaatcccagctacatgggaggctgaggcaggagaattgcttgaaccccagtggcggaggttgcagtgagctgagaccaggcctcagcactccagcctgggcgacagagcgagactccatctcaaaaaaaaaggaaaataaatagttccctgctcagaaggttgtggggaggacagaggatgggaggcacaggtgcttagaccctcctccatgtttgaggtgcctgctggccccatacacccggtccctctggctccactgtggaaccagctctcgggggtcccatgcaggatgccacgccaaacacctttcaatctccattgtgtctttctcttttgaaacaacgccgacctggatgtgaatcctgactgccactcagcagcagtggaaaccctggcaagttttgtaacctgtagaagcccgtttccacatctggacaatggagttggtggcactggtctcacggggttgtaatgaagattaaataccttagcagatgtcaaggggtctcgacctgattccttcagagccaggattctttactgagggatcagggatgggctctgggggagttcatgaaccccagaatttgcaggtgaaattgtgtgtctttgtgagaacacggttacgcatttttctgggaaggagatccataattttcatcagatccagattctttttttttttttttttttttgagacagagtctcgccctgttgtccaggctggagtgcagtggcatgatcttggctcgctgcaacctctgcctcccgggttcaagcgattctcctgcctcagcctcacgagtagctgggactacaggcataaaccaccatgcccggctaatttttgtatttttagtagagatggggtgtcaccatgttggccaggctagcagatccagattctttttttttttttttcgagatggagtctgactctgtcaccaggctggagtgcagtggcaggatctcggctcactgcaaccttcacctcccaggttcaagtgattatcttgcctcagcctcacgagtagctgggactacacgtgcttcaggcacttgctgccatgtccagctaattttgtagttttagtagagacagggtttcaccatgttggccaggatggtctcgatctcttgaccttgtgatctgcctcctcggcctcccaaagtgctgggattacaggtgtgagccaccgcacccggcctcttttgttttttagacggggtcttgttctgtcacccaggctggttggtgtgcagtaacataatcatagctcactgtttgtagcctccaacttctgggctcaagtggtcctcctgcctcagcctgtggagtagctgggactgcaggcgtgtgccaccacacctggctaattaaaataaatttttttttttttttagagatgggttcttgctgtgttgcccaggctggtctcaaactcccagcctcaagcgatcctccaacctcagcctcccaaaagtgttgggattacaggcatgagccaccgtgcctggctcaaatcttttcatatgtgaacatctcagcatgttttctttctttcttttttgagatggagtttcgctcttgttgcccagactggagtataatggcgtgatcttggctcactgcaacctctgcctcccaggttcaagtgattctcctgcctcactctcccaagtagctggggatacaggtgcccaccaccatgcccagctaatttttttgcatttttttttttagtagagatgggttttgccgtgctggccaggctggtcttgaactcctcacctcaggtgatccacccaccttggcctcccaaagtgctgggattacaggcgcaagtcactgcgcccagcctcatcatgtttttttcttaaaagataaagacttttctttttactacaaccacaatactattgtcaaaactaaactttaaaaatttccttggtgttatcaaacattcaatgtccagattccagtggtttcataaatagcctaatttgcttttagtttgtttgaattaggatctaagtaaaatctacactttgtgattggttagtatgttttaagagtctttgaaactttatttttttgattaaaaaatgtttaatttagagataggggtctcactatattgcacaggctggtctcaaatgccccaaagtgctgggattacaggtatgagccaccacacctgactgattctttttttttttttttgagatggaatctcactctgttgcccaggctggagtgcagtggcgcaacctcggctcactgcaacctccgcctcccagattcaagcgattctctcaccccagtctcccgagtagctgggattacaggcgtgcaccaccacacatggataaattttgtatttttttagtagagacagcgcttcaccatgttgtccaggctggtctcgaactcctgacctaaggtgatcttaggcccaccttggcctcccaaagtgctgggattacaggtgtgaccaccacgcccagccaatatgtggtcttatgagagcattggttcttttttttttttccctgaggcagggtctcaccctgttgcctaggccagagtgcagtagctccatcatagctcactgcagcctccaactcctggactcaagggatcctcccacttcagccttctgaatagctaggactacaggcgtgtgtcaccatgcccagctaatttttaaaattgtttttgtagagatgggttctcactatgctgcccaggctggtctcaaactcctggcctcaagcgatccttctgcctcggcctcccaaagtgttgggattacaggcatgagccaccgcccctggccgagcattgattcttgatcctcatgtgcatctgagtcacagagcagggtgggggctggctcttccccaacctggatccctggaaactacccccagagattctggttcactgggttggaatgggcctgagcatctgaaagtttgaaaagctccctgtgattctggtgtgcagcccaggcagaggccccactgtgtccacttctcttgaaaggagtggttcacaccaacacccccacttccctacctcccgtgcgctcctcgagcatgacaatgtggcttctgcccccgacacatggcacaaaaaccgctctggcacaggcctcacagttgctaagtgcagagccccatcctcagtcttccttctatttacttctgctcacctcccaaaaccctcttctccttcccaggtacccactcctgatgatgcttctctttttgttggacatgccctgtgggttctttatcttattattttattttagagaccgtggcttgctctgtcacccaggctggagtgcagtggtgcaatcacaggtcactgcagcctccaactcctggactcaagccgcagcctcccgagtagctggcgagtagctgggactacaggcgtgcacccccatgcccagctaactttttctttttttcttttgttttttgagacggagttttgctcttgttgcccaggctggagagcaatggcactatctcggcttactgcaacctctgcctcccaggttcaagcgattctcctgcctcagcctcctgagtagctgggatcacaggcgcccaccaccacgcctggctaatttttgtatttttagtagagacggggttttgctatgttggccccggagttcaatttttgtatttttagtagagacggggtttcaccgttttcaccaggatggtcttgatctcctgacctcgtgatcctcccgcctcggcctcccaaagcgctgggattacaggcgtgagccaccgcgcctggccacggcagcatctcttctgaactccagagccattccctaccaccctctgggcaccaccatccacatctcctgctgccgcctcagccttaacctctgcaaaaccaaatccgttctttctctcgagctctgcagaagctaagctgtttcaccaggccacgattcaggaaacgctttgggattcagcttctgttcttgtgaaatgggaagaatccctgtggtgagctccagatgagagcacaaaggggaacaggggtgcccgcggctggcacgccatggctggcacgccatggcactcagtggggtcaccgccccctcctgctgtcccacctccaccctgcctgctcttctcctggaatgactccttctgccagctctcagctacccaggccagaggcccaaggctcccacatctctttagctactaattctggtagatccccttttggaaatagccctcaaatctaccccagagctactgtcaaagttcagggctccatctcttttggtttttttgaaaatattttttcaaattaattatttgttggccgggcgcagtggctcacacctgtaatcccagcactttggaaggccgaggcaggtggatcacctgaggtcaagagttcaagaaccagcctgaccaacatggtgaaaccccatctctacaaaaatacaaaaattagccagggatgatgctgcatgcctgtaatcccagctactcgggaggctgaggcgggagaaccacttgaacccgggaggcagaggttgcagtgagttgagatcacaccattgcactccagcccaggcgacagtgagactccgtctcaaacaaaaaaaaattatttgtggaggcagggtcccactatgttgcccaggcctcaagtggccctcctgccttggcctcccatagcactgggattacaggtgacagccaccgcgcccagcctactttttgtctggccaagactacctcagccttcttttgcctcccaatctgtctccagttggtggctgaagtgacccttctggagcaaaaccataatcatatcactccctcttttaaaattctgtgatgggtcaggcatggtggatcacacttgtaatcccagcactttgggaggccgaggtgggaggactgcttgagcccaggagttcaagaccagcctgggcaacatagcgagaccccccgtctctacttaaaaataataaaataaaatgaaaagaaaattttttttgagatggagtttcgctcttgttgcctaggctggaatacaatggtgggatctcagctcacggcaacctccacctcccgggttcaaccgattctcctgcctcagcctcctgagtagttgggattacaggcatgtgccaccatgcccggctaattttgtatttttagtagagacggggtttcaccatgttggtcaggctggactcgaactcctgacctcaggtgatcggcccacctcggcctcccaaagtgctggaattacaggtgtgagccactgtgtccggccaataaaatgaaattttatgatggcttctgcgatctggccaaattcctcagctaaatagtttagttctttctccctgtggcctctcctcccaccatgtcacctgtgaatcccacactgcccccaccccgacactgtctgcaggtgaacagatcagttttctcagccccaaatgtcagccccaccccacacctctgcctggcaaacatcactcaccggtcctcagagacacctagtcatttattccatgagtccaccacacttgagaaacgcttcttttcttcgcgagcacgcctaccctgtgctagacagtgttcctaagggctttcaaacataaagtcttttgttttttgtttttgagacgcagtcttgctctgtcgcccaggctggagtgcggtggcacaatcttggctcactgcaacctccgcctcccaagttcaagcaattctctgcctcagcctcccgagtagctgggattacaggcgctcggctttttatttttttaattttttttattttttgtatttttagtagagacggggtttcaccatcttggccaggctggtcttgaactcctgacttcaagtggtccacttgcctcggcctcccaaagttctgggattataggcgtgagccactgtgcccagcctccaactcctggccttgtcttcctcccaccctggcttcccagagtgctgggattaacagacatgagcctccacacctggcaacttctttccatttttcactgattctctgacacatcctcattgagcacctgcactgtgtggggtgttaataattgctaggcatggaggcaacagcgtgggcagctctttctcttacttgtcaggctttagcctatgctgttgcaggactgtgccttggcctggaagccccttcccttatcctcatccccaatctcccccttcagctcttgttcctcttgcaggtcttcccttaaacatcacttcctcagcaggggcctcacagacacgcccggaggttagatcctggtccctctgtgcttcctgttcttcccccatcatcacagtctacggctgtttcctctcgatgggcaaagactgtgtctggccattgagttttctgctatatccaagtgcttcgcatactgaaccatataaatgtgctgcttttattggtcaaaacggccaaatattggcaattttatattggttagcttcatagtatgtgagctaggatacttatcccatcagagaggttgcgtagcacagtgaatcagagcccaggctctggggccgcacacctgaggtccagccctggctctgccacttgtcactaagtgattgtggactggagacaaccctcaggggccttgggttcctaatctgtgacagggatgacaataatgacctcctcgtgctgttataaaatacagaaatgtactaaaatacaaaaattggccaggcatggtggcacatgcctgtaatcccagctactcaggaggctgaggcaggagaactcaggaggcagaggctgcagtgagtctacttttattgccaaagctcgggggtccatcccttttccattgcatgccactgcactccagcctgggcaacaaagtgagactgtctcagaaaaaagaaaaagaaaaaaatgtttaaaagccaggagtttgagaccctgtctctattaaaaaaaaaaaaattaccttggcatggtggagcagctactcaggaggctgaggtgagaggaccacatgagcccgggagttcaaggctgcagtgagccatgattgcaccactgcattccactctgtctcaaaaagaaagaaagaaaaaagtcaagagaactggagctgaaaccatgaaaggtcagttttcagcaggagagtgatcaaagaaaaccagaactagacagtcgttaaaatagcaaaaacatattgcattccagactattgctgtaggggaagagtgaccttagatcagaactgggctgaactctacaccatgggggttatagccaacgagcagagttgggggcagtggatgggacattaccatgagaaagcactgggggttgggggtattctgacaagaccaacctaaagggattcttgctgagggcaggccaaggtggtcagacagcgcctgggggagagtggagaatgaggacccccatcagggatcgggggcaatcagatgtggaggatgagggactggctaagctgacttagcagtattcttgctaaaattggacgatgcagaggtgaacacggaagtccaaggcctaactggaaaagagctgagggaacctgagtgaggtttggctatagacagaacctctgagtgagcccatcaaagttactttatttatttgtttgtttattaatttatttaagacagagtctcactctgtcgcccaggctggagtacagtggtgctatctcggctcactgcaaactctgcctcctaggttcaagcaattctcgtgcctcagcctcccgaggagctgggattacaggcacatgccaccacacccagctaagttttgtgtttttagtagggacagggttttgccatgttggacaggctggtcttgaactcctgacctcaggctaattttttgtttgtttttattctctttttttttttttttgagactgagtttcgctcttgttggccaggctggagtgcaatggcgcgatattgactcactgcaacctctgcctcctgggttcaagcgattctcctgcctcagcctcccgagtagctgggactacaggcgcacaccaccatgcccagctaatttttgtatttttaggagagacggggtttcataatattggtcaggctggtctcaaactcctgatctcaggtgattcgcctgcctcagcctcccaaagtgctgggattacaggcgtgagccaccgcgcccagccttttgtttgtttttaaatttaactttttttttgagaccgaattgcactctgtcacccaggatggattgcaatggcgcaatctcagctcattgcaacctctgcctcctgggttcaagagattctcctgcctcagcctcccaagtagctgggattacaggcgcctgccaccacagctggttaatttttgtgtttttagtagagatgaggttttgccatgttggacaggctggtcttgaactcctgacctcaggtgatcaacccaccttggcctcccaaagtgctgggattacgggcatgagccaccatgcccggccttaacttttatcttaagttcaggggtacatgtgcaggtttattatataggtaaacttgtgtcatgggggttgtacacattatttagtcacccaggtattaagtttagtacccattagttatttttcctgatcctcttgagggaagagagagaccctctcatattgtttcatactcagaaaaggaaagagaagcgaaactaaaggcaggtagcctggtgcctaggaaccagaccggaaaccaaggaaccagacccgaaatcaggcctgggcgtgcctgacctaagcctggtagttaaaattcgacccctgacctagcaactgttgttatctatagattccagacattgtatggaaggacattgtgaaacctcccgttaggttctgtttcactctgaccaccggtgctcgcagcccctgtcacgtaccccctggcttgctcaatcacgaccctctcacgcggacccccttagagttgtgagccgttaaaaaggacagaagttgagcacctgaagagctcggattttaagacgctagcctgccaatgctcccagctgattaaagccactcccttcactatcttggtgtctgaggggttttgtccacagctcgtcttgctacacttgccctcctccaaacttccgccctccaataggctccagtatgtgttattcccctctatgtgtccatgtgttctcatcatttagctcccacttataagtgagaacacgcggtatttggttttctgttcctgcgtttgtttgctaaggataatggcctccagcgccatccatgtccctgcaaagaacgtaatctcattcttttttatggctgcatagtattccacggtgtatgtgtaccacactttctttgtccagtctagcattgatgggcatttaggttgaatcatgtctttcctatggtgaatagtgctgtgatgtgtctttataacagaatggtttacattcctttgggtatatacccagtaatgggattgctgggtggaatggtatttctggtttttggtctttgagaaattgctgcactgtcctccacgatggtttaactaatttacactcccaccaacagtgtataagtgatcctttttctttgcaacctcgccagatctcggtggtcaactcctcccactccccaggcaatgctgatttgctctgtgcctatagttttgcctttcccaggatgctgcgggaatgggatcatacggccttttggatctggctccttttagttagactgatacatttgagacaggtccctattgttgtgtgtatcagtagttggtttcttctttttttgagatggattctcagtctgtggtccaggctggagtgcagcggcatgacctcagctcactgcaaactccgcctccctggttcaagtgattatcctgcctcagcctcccaagtagctgggattacaggcacatgccaccacgcccggctagtttttgtattttttcgtagagatgggatttcaccatgttggagaggctggtcttgaactcctgacctcgtgatctgcccaccttggcctcccaaagtgctggaattacggcgtgagccatggtgcccagcctgcatcacaggttgtttacccaatactcaccagttgcagaattcnnnnnnnnnnnnnnnnnnnngcggaattcaaatccattttttaaaaaatcagcctgaaaaaaaaagaaaaaaatcagtctggccaggcacggtggctcacgcctgtaatcccagcactttgggaggccaaggcgggaggatcacctgaggtcaggagtttgagagcagcctggccaaaatggcaaaaccctgtctctactaaaaatacaaaaattagctgggcgtggtggcgggcacctgtaatcccagctacttgggaggctgaggcagaagaatccctggaacccgcgggacggaggttgcagtgaggtgacatcaggccacttcactccagcctgggcaaaagagtgaagctctgcatcaaaaaaaaaaaaaaaaaaaaaaaaaaaaaatcagggtgggcacagtggctcactcctgtaatcccaggactttgagaggctgaggtgcgaggattgcttaagcctgggagttcaagacgaggctggggaatatagtgagacccccatctctacaacaaaaaatatacaaaaattagccgggcatggttggtgtgcgcctgtagtcccagttccttgggaagctgaggcgagaggattgcttaagcctgggcagttgaggctgcagtgagccatgatcgtgccactgcactgcacctagtttgaatggagtgggagtgggggattaggctctcctccctgccgtttgctcccaggccttttccgtagctggatgtgaccaacagagacagtgcccagcctcagtatagctagctcttagtggagggacaggagccatctggggcagatgtgggagagaatgtggcgaaggagagccgggtgcagtcaaggaggcttgtggctcggaggggaggtggggtgagtgagtggagactcagcagcttggctttggggaagtagacaagagagggccctctttggagagcggagcaagccaggatgtctggccttcacttccacttggaacagaagtgtgctgtgtgcgcgtgcttgtgcgtgtgcgtgcacgtgtgtgcgcgctaaatcaaacaccctcgctggctctgtgttcccctcaaggggaagccaactccacggatggcgggggtccattaggctgcaggtcttctccctgccgatagatggcgctgttgcaccgcgcctgggtttgcctctgcccgcagccatgcagggcccatcacgggctatgcctaccgcgcgaggggccttcaccatgtccactatccttatttatttatttatttatttattttttaagtgtgggtactggccgggcgcggtggctcacgcctgtaatcccagcactttgggaggccgaggcgggcggatcacgaagtcaggagattgagaccatcccagctaacacggtgaaaccccgtctctactaaaaacacaaaaaaattagccaggcgtggtggtgggcgcctgtagtcccagctactcgggaggctggggcaggagaatggcgtgaacccgggaggcggagcttgccgtgagccgagatcgcgccactgcaacagaacgagactatctccaaaaaaaaaaaaaaagtgtgggtatatagtaggtgtatatatttatggggtgcacattgataaaggcatgcaatgcataataatcacatcatgggctagatgcggtggctgacgccgagatcgcgcctctgcagtcgccaggccactgcaggcgccacagtggcgacagagcgagactccgtctcaaaaaaacaaataaataaataaatcaggttaggccgggcgcagtggctcacgcctgtaatcccagcacttgggaggcggaggcgggcgaatcacgaggtcaggagttccagaccagcctggccaacatggtgaaaccccgtctatactaaaaatacaaaatttagccgggtatggtggcaggcgcctgtaaccccagccactcgggaggctgaggcaggcgaatcgcttgaatccggaaggcggaggttgaagcgagccgagatcactccattgcactccagcctgggcaacaagagtgagattctgtctcaaaaaaaaaaaaaaaaaattacatcatagagaatggggtgtccatcccctcaagcatttatcctttctgttacaatccaattgcattcttttagttatttcgaaatgtacagttattattgactgtagtcaccctgttgtgctagcaaatagtaggtcttattcattctttctattttttttgtacccattaaccttccccacctccccatcatccttttttttgttttgagacggagtcttgctctgtcacccaggctggagtgcagtggcacgatctcagctcacttcaacctctgcctcctgggttcaagcgattctcctgcttcagcctcccgagtggctaggattacaggcctgcgccactatacttggctcatttttttcggggttttgccatgttggccaggctggtcttgaactcctgacctcaggtgatccacctgcctcagcctcccaaagtgctgggattacaagcatgagccactgtacccagccccatcatcctcattttatttattttttatttttattactatttttttaggtggagtcttgctctgtcacccaggctggagtgcagtggcgtgacctcggctcactgcaacctctgcttcccgggttcaagcaattctcttgcctcagcctcccgagtagctgggattgcaggcgcctgccaccacgcccggctaatttttgtatttttagtagagacaggagggttttaccattttggctaggctggtctcaaactcctgacctcaggtgatcctcccgccttggcctcccaaagtgctgggattacaggcgtgagccaccgcgcctggccagactgattttttttttaagtgaatttgaaagctgcaactggtgagtattggataaacaaactgtgatgggattgcaggtgtccacccccaagcctggctaatttttgtatttttagtagagaccatgttggccaggctggccttgaacccctgacctcaagtgatctgcctgccccagcctcccaaagtgtttgggattacagtcgtgagccaccgcacccggtcagaagtttaatttttttttttgagacggagtcttactctgtcaccccggctggagtgcagtggcctgatctcggctcactgcaagctccacctcccaggttcacgccattctcctgcctcagcctctggagtcgctgggactacaggcgcccgccaccaagcctggctaattttttcgtatttttagtagagacggggtttcaccatattagccagaatggtctcgatctcctgacctcgtgatccgcccgcctcggcctctcaaagtactgggattacaggcgtgagccaccgcgcccggcccagaagtttaaatttaactaggtgcccagtgatctcatcaagcccacagcactccctcaccctcgcccccacaacctcccttccccccacgccccccttcctcaccgcagtccctcccctgggacccctagatcttgaggctgatgggccagttcccagtttcactggttgttaaatattttgacagtgacccctgacagcaggagaggcagccaaactcaacagctgttctctcttccccccaggcctggcgctgctgctgccgcccgtcaccctggcagccctggtggacagctggctccgagaggactgcccagggctcaactacgcagccttggtcagcggggcaggcccctcgcaggcggcgctgtgggccaaatcccctggggtactggcagggcagcctttcttcgatgccatatttacccaactcaactgccaagtctcctggttcctccccgagggatcgaagctggtgccggtggccagagtggccgaggtccggggccctgcccactgcctgctgctgggggaacgggtggccctcaacacgctggcccgctgcagtggcattgccagtgctgccgccgctgcagtggagccgccagggggaccggctggactgggcacgtggcaggcacgaggaagaccacgccaggcttccggctggtggagaagtatgggctcctggtgggcggggccgcctcgcaccgctacgacctgggagggctggtgatggtgaaggataaccatgtggtggccgccggtggcgtggagaaggtgctggtcctgcctgtccctggtccaaccccaccctcagcacacccctcccctcccctcccctctccagagcctccagccatgaccgggtgaacagccatggcctggagtcagcaacacaagactcttcccacctcagctcctccatctgagctgggctcagttgagctcatccagctaagctaaaggggagctgggcctgcttttctttttctggagatggggcctcagtctctccagtagctggatatacaggcatgctccaccccactggctaatttttgctttttttttttttttttttttttgagatggagtctcactctttcacccaggctggagtgaagtgatgcaatctcggctcactggaacctctgcctcctgggttcaagcaattctcctgcctccgcctcccgagtagctgggattacaggcgccagccaccatgcccggctaatttttgtattttttagtagagacagggattcaccatgttggccagactggtctcaaactcctgacctcaggtgatccacccacctcggcctcccaaagtgctgggattacaggagtgagccactgcacccagctgcctttttttttttttttttttttttgagatggggtctcactatgttgcccaggctggtctcaaacttctggactcaagtgatcctcccaccttggccacccaaagtgctgggattataggcataagccaccacgcctggttttggaattggttctttatctttgttctgctgctgcgtggcgtgatgttcaagagcaaaggacaacacaggggaagccagtgtcactggcaccacagccttgagcccatctctctagccctctgcaccttatttcccatctgtgaaatgcccttaaacaccccttctaattttaatattctgagtcaaattgagctcaggtccaaatgccaaatattgctgatattcatccactttttgacccacaaaagtggtcatttaacctacaataaaacatcctggctcagtggctcataccatgtaatcccagcactttgggaggcccagttggggggattacttaagtccaggagtctgagaccagcctgggccatatagcaagattctgtctctacaataaaattaaaaaattagccatgcttgtgggcaagcccctgtagtcccagccacttgggagactgagctgggaggatcacttgatcccaggaggctggaggctgcagtgaactatgactgcactgaactccagcctgggcgacagagcgggaccctgactcaaaaacaaaacagtggccaggtgcggtggctcacgcctgtaatcccagcactttgggaggctgagatgggtggatcacgaggtcatgagttagagaccatcctggccaccatggtgaaacgtcgtctctattaaaaatacaaaaattagctgggcatggtggcacgcacctgtagtcccagctactcgggagactgaggtgggagaatcacttgatcccaggaggtagaggctgcagtgagctatcattgcaccactgcactccagcctgggcgacaggttgagaccctgtctcaaaaacaaaacaaagcaaaaacaaccccaaagtctggtttccttattaaccccaagttcatggtccacccgaagcttttcaaatgtcagtcccggctccccgcgccccagctgcagtgctgggccctatcgtcaccctcgccctcccggctccctgcgccccagtgccaggtgctgggcccagtcctcacccttgtcctcccggctgcccagcaggcggtgcgggcggccagacaggcggctgacttcgctctgaaggtggaagtggaatgcagcagcctgcaggaggccgtgcaggcagctgaggctggtgccgaccttgtcctgctggacaacttcaagccagaggtaaggtgggctctgcctccggggagggatctgtggtgggctcttacctccccttggcttgtgtcccgcaggagctgcaccccacggccaccgtgctgaaggcccagttcccgagtgtggctgtggaagccagtgggggcatcaccctggacaacctcccccagttctgcgggccgcacatagacgtcatctccatggggatgctgacccaggcggccccagcccttgatttctccctcaagctgtttgccaaagaggtggctccagtgcccaaaatccactagtcctaaaccggaagaggatgacaccggccatgggttaacgtggctcctcaggaccctctgggtcacacatctttagggtcagtggccaatggggcacatttggcactagcttgagcccaactctggctctgccacctgctgctcctgtgacctgtcagggctgacttcacctctgctcatctcagtttcctaatctgtaaaatgggtctaataaaggatcaaccacatggggttctgcggtgataatgagcacatagtgaggggtcagcaaatgtcagaagttacctgggacagccgggcacgatggctcacacctgtaatcccagcactttgggaggctgaggcgggaagatcacttgagttcaggagtttgagaccagcctggccaacatggtgaaaccccatctctaccaaaaatagaagaattagctgggtgtggtggcacgcgcctgtaatcccagctacttaggaggctgaggcaggagaatcgcttgaacccaggaagtggaggttgcagtgagctgatggtgccactgcactccagcctgggtgatagagcgagactctgtctccaaagaagaaacaaaggaaagaaagagagaaagagagagggagggagggagggagggaaaggaaggatggaaagaaaggaagaaaggcaggcaaaagccccagacaggccaaaaccttcatccttcatgcacccaacctgtaccaaacaccagcatggcctggctgtgagtgcacagcagatggaggtttgctgggcagagacactgggctggcctagacactgcctttggtgataccctaaaccaaaggggccagtcccacagtaagaaggagaccactactactcctgctgccctcctccccccaccttgcctagtttacaagacaggaggaaagagagaaagcaaaaagttagaaaacaaaacaaaacagaagtaagataaatagccagaagaccttggcgacaccacccggccctggtagttaaaaaaaagtaacaataataataatatcaacccctgacctaaactacttgtgttatctgtaaattccagacattgtatgaaaaagcattgcaaaactttctgctctgttagctgatgcgtgtagcccccagtcacgttccccgcttgcttgagatatcatgaccctttcacgtggaccccttagagttgtaagcctttaaaaaggccaagaatttctttttcagggatctcagctattaagatgcaagtctgccaatgctcctggccaaataaacctcttccttctttaatccggtgcctgaggagttttgtctgtggctcgtcctgctacaagaggacacagcccagaggtgccacctgcagctgccctgtcccctctaatcccagctccaccctgcctgctcccgtccttcctccagggggaacatggacacgctcagatgaaccccagcttcttatgcctgaactggggaaactgaagccccatgggaccaggggttccactgggcatcaagggaggaaagttgagccccggggtgatctgggaactgggatctgggatctgggcaggcattggggcctgacagagcagaagtgaggagagggtaccaggagctgcaaactcggtgcctccaggacctattcggataaaataaatgggtggaactggaataagacaaagtgggggtgcgctgtggccaactggaaaatgctcgttgcagccacagcgttccattaaaaaagcgaaaggaacctgcctgcctgagtcttaagctccccctaaacccagaaatgggttagccctccagtatcctccagctctgagagctggggcgggcactccattactgggggaacaggaaatggatcctgggcactctagggcaacacacgccctccttgcagggaaatggatttccaggcaggggagatgcatgggcagaggtggcttggattgtttgctgtaagatttgaagctgtgatcaggaggtggctaggagatgggctgggtccagaccacaaaatggtagatcggaggatttggactctgtctcatgagtgagctggaaatcaagctggaaaatcagataagcttattcgcagcttcaatccagtccgttgcagaaggatgcatttgagggggctagagcagctgcagggaggccaggaggagctgtggaagaggacttgagtgtgggtcatggccatggggtttggagagaagtgatacagtgtcttcagagcttcagaaggcagagggagttcgatggctcaaggcagttggaagagttgggtgtgactgagggggtggggaaatggggcatgcgtggcaggcaaggactcttatgcatcacctcccagtcccttgtccatctggctacacttcctctttgcctggccagcctaggaccaagctgggatcatttccccaggatgccccacagacaatggcaaatgtgcccatcatagcagtttgtttaatgaaaatgatatgctgttgtgagtacgggatgtgccagcaatgctggctactgcatgagacgggagctagcagggagcaccttcatccagggtgtgcaggtccccttccctcagttaatgctcgtgggggcgggcgttagcctctccacttaccgaagaggagactgaggctttataaagttaagagagctgcttagggtcactcatcaataaagtggtggaggccagtcatggtggctcacacctgtaatctcagcactttgggaggctgaggcaggaggatcacttgagcccaggagttcaagaccagcctgggcaacatagtgagactcaatttctatttttaaaaaattatccagctgtggtggtgcacacctgtagtcccagctactcaggagactggggtgagaggatcgcttaagcctgggcagttgaggctgcagtgagctgtgactgcaccactgcactccagcctgggtgacagaggccctgtctcaaacaaaaataaataaataaataaatatataaagtggtggagcagtttgaattgtgtcattcactcattcaatatttaactgagcatctactgtgtgccaggcactattctagacaatgaacatacaacgagtaaacagataaaaatctctgtcctcagggagtctgtatgttggggttggggtgggggcggggaagaatagacaatgaaaaaatacttaaggaaaatatgtagacaccaattgtcctgatggccacccctgatggccaccagagggcactgcaaccacgcggccctccgttcgtctctaattccagctccctttccggattccgaaggcaatagccaaggaggctatgaatacgcagcatagcatctgctcaagaatcaacgcgaggaggcattggcagcagttttttctccacccacttttccagcctcatcccctcatcagacccccatccaactgcccagggtacccctgtgacttttcaaagccccgtgtactccagattcaccagctactcacattcactcccagccacccatcccctcccaaatactgtctgggttacccaccaaccccatccatccgctcacctgatgcctgtcctcctcctcacccacccacccgcgcccctcgccccttccacctgctgtcctgcccaccggaaactggccaaattgtcccatagatttttttttttttttttttttttttggataaacacagaaattgacattcctggtcttaaagcttgaaacttaaatttgccttatctgagttccttccccaggaaactgaccctcaggcctcccagatagcatcaaggaactgaaactccttttctttacccccctctaattcctgttttcccacccacagctacatttgctccccactatataaacccccaattggagtttgttggagagatggatttgagacttatctcctgtctccttggcagatgtcatctgaataaagccttctttcctggcgatactcattgtcccgggatcccagatcagctttctgtgcagtaagcaatggggacctagaacgtgggaatccctggcgtttcggtaatacacccatccatcctgtccacccccacccatcctgtccacccccatctatcctgtccacccccgacccatcctatccacccccttgtgcttccatccactcatcactcttcccacccctccgcccacccaccatccgatgctacagaagcccagcaactggggcactcaatctagaggtcaaagatggcaagaggtcaaaccagattgacagtgagtcacctcagtggatatgagttttagtgtgctgaggccgtgaaaggtaaaagcatttaaaaacagcaaggccaggcacggtggctcacgcctgtaatcccagcactctgggaggccaaggcaggtggatcacctgaggtcaggagttcaaagctagcctgaccaacatggggaaatcccttctctactaaaaatacaaacttagctgggcgtggtggcatgtgcctgtagtaccagctactgctacttgggaggctgaggcaggagaatcgctgaacccgggaggcggaggtttccatgagccgagatcacaccactgcactccaccccggggaacaagatcgaaactctgtctcaaaaaacaaaaacaaaaaacccacaaaaattagccaggcgtagtggcgggtgcctgtaacccagctacgcaggaagctgaggcacaagaatcacttgaacctcaaaggcagaggttgcagtgagccgagatcatgccactgcactccagcctgggcgacagagtgagactctgtcccaaaaaaaacccagagcaaacaaacaaaaaacacaacggcgagacattcttagcaaaccaactatctgcaaacaattcaacgtcggatctttaaaaaaatcccgctgtggcattatgctgcggacacatacattaatttatggctagcccttcaagacaaccaggtgggtaaaattatgtaaatgttcaccgcctctatactttgttccaatgacttcctgagtaattgattgttttgccaattactcagcaacatttaagacctgcttccggaggccctaagtagctcagcattctaagaccgaagtactgaagaaaatctgcctgtgtggctgtgaataacatctccatccgtcactgtgcacatcagatttaggccagataacgcaggctttatttatttcaggtacgccttgcgcttcagatcatgggactctagtatagcacccccagaaaattatcaagggcaaaaaaatcataatacatacctctagttcagtgggtccttggataacctctttcctctctcctagttcttcagctaaaagattcaggagccttagcaacaagaaggagctatcccacaagttgcattattctagatattcggacacttttttttttttttaagcaggagtcttgctatgttgcacaggctggtcctgaactcctgtccttaagtgattctcttgccttggccttccaagtaactgggattacagcggtgagccaccgtgccagggttttggatgctttttttttttttttttgagacagagtctctcttgtcgccctggctggagtgcaatggtgtgatcttggctcactgcaacctctgcctcccgggttcaaacaattcttctcccttggcctcccaagtagctgggattacaggtgcgtgccactacactcagctaatttttgtatttctagtagagatggggttttaccatgttggccaggctggtctcgtactcctgatctcaggtgatccgcccaccacagcctcccaaagtactggggttacaagcgtgagccatcgcgcctggccggatactttttaaccaaaggaaaaagcaagcatctttattggaataatatatcaatatatgcaggtaatcagacaataccagtcagacaacactgacttctttttttttttttttgagaaaggaaggaaggaaggcagaaaggaaggaaggaaggagggaaggccggaggtggtggctcatacttataatcccagcactttttgaagcccagaagggagatcacttgaggccaggagtttgagaccagcctgggcaatatagagagaccccatcttgacaaaaaatttaaaaattagccaggcatgataatttgcacctgtagttccagctacccaggaggctgaggcaggagaattgctggagcccaggagtttgaggctgcaaccagccgtgactgcaccactgcactccagcctgggcaacagagagataccctgtctcgaaaataataaataaaggccgagtgtggtggctcacacctgtcatcccagcactttgggaggccgaggcaggcagatcacctgaagtcaggacttcaagaccagcctggccataatggtgaaaccccgtctctactaaaaatacaaaaattagccaggcatgatggcaggcgcctgtaatcccagctacttgggaggccaagacaggagaatcgcttgaacccgggaggcggaggttgcagtgagccaaggtcgtgccattgcactccagcctggagaacaacagcgagacttcgtctcaaaataataataaataaataaataaataaatatgtaaaaagtcccttaactgaggccaggcgcagtggctcatgcctgtaatcccaacacttcgggaagccaaggagggtggatcacctgaggtcaggagttcaagaccagcctgaccaacatggagaaaccccatctctactaaaaatacaaaattagctgggtgtggtggcgcatgcctgtaatcccagctactcaggaggctgagagaggagaatcgcttgaaccctggaggtggaggttgctgtgagccaagatcacaccattgcactccagcctgggcaacaagagcaaaacttcatctcaaaaaagccccttaactataatctaagaaacaaaaaatatttaatttttattttttgcatgatctgcttagttttcttaataagctgtgaaccagaaagggaatttgctgcggtttggcagccttttaggtggaggattatagtgaatacatttttagattattggtatagtaacttccccaaaggatgtaagattttgaggactaaaccaagtcctgcactttccattccaacctaattaattccagtgaatgaaacattcattggggaaagcacagaagatgcagaagagctgcttacatgacctgagtcaacaattcagtgaccctctgcgtataataatcaaaatagggccaggcgcagtggctcacacctgtaatcccagcactttgggaggccgaggagggcagatcacctgaggtcaggaatttgagaccagcctggtgaaaatggtgaaaccccgtttctactaaaaatacaaacaattagctaggcgtagtggcgcacacctgtaatcccggctactcgagaggctgaggcaggagaatcgcttgaacccaggaggcagaggtcgcagtgagtcgagatcgcgccattgcactccagcttgggcaccaagagtgaaactcggtctcaaaaaaataaataaataaaaataaaaatagaacaataaagtccattcataaattttctagcatagttaacttatccacctcctcttgcttttcgttaattaatttagttatcagagtacaaaatgaaaaagtaaaaaatatccattcactctcattcccatgaggtaaccacgtttaaggagctctgtgtttttagtcctcctggcatctacacttgagtggaaaagatgatcatttgtggttttaagcactattgactccctgatgtgaagaacaaagaatgtatctcactcattctttttttcttctttttttttgtgctgtttttattggtagtcttcctactagttatcatcataactttaaatgatatatttaatccccttttcttgaagcattgtttttatttttatttttttacttgtatttatttatttattgagacagagtctcactgtgtcacccaggctggagggcagaggtgtgatcttggctcactgcaacctccgcctcctgggttcaggcagttctcccccttcagcctcccgagtagctgggattacaggcacccgccaccatgcccaactaatttttgtatttttagtagaggtggggtttcatcatgtcggccaggctagtctcaaactcctgatctcaaatgatccacccaccttggccttccaaagtgctgggactggccggggatgatggctcacgcctgtaatcccagcactttgggaggctgaggcgggtggaaatcacaaggtcaggagatccagaccatcctggctaacacggtgaaaccccttctctactaaaaatacaaaaaattagccaggcgtggtggtgcatgcctgtaatcccaggtacttgggaggctgatgcaggagaatcgcttgaacctggaaggcggaggttgcagtgagccgagatggtgccactgtactccagcctggacgacagagtgagactccatctcaaaaaaaaaaaaagcaaaaaactccacaaagtgctgggattacaggcgtgagccactgcgcctggcctgaagcatcgtttttaaaattcagatataatttacatcgcatatacttcactgctttaaagggttcaggctgggcacagtggttgacacttgtaatcccagccctttgagaggctgaggtgggggggatcactcaaggccaggaatttttgagaccagcctgggcaacatagtgagactcgctctctaccaaaaaatttaaaaatgagctgggcaagatggcacacacctgtggttccagctacttgggacgctgaggtaagaggattgcttgaggccagaagctcgaggcagcagcgagctgtgattgcaccactgcactccaacctgggaaacagagtaagaccccttctttttttttttttagatggagtctcgctctgtcgcccaggctggagtgcaatggcgcagtctaggctcactgcaacctccacctcccaggttcaagcgattctcctgcctcagcctcctgagtagctgggactataggcgcccaccaccacgcccagctaattttgtgtattttcagtagagacggggtttcaccacattggccaggctggtctcgaactgctgacctcatgatctgcctgcctcagcctcccaaagtgttgggattacaggcatgagccaccactcctggccaaaaccccttcttaaaaaaaaaaaaaaaaaaaaaaaaaaaacatcctttttttttttttttttttttgagacagagtttcgctctcttgcccaggctggagtgcagtggcgcaatctcggctcacctcctgggttcacgccattctcctgcctccatctcccgagtagctgggactacaggcacctgccaccacgcctggctaattttttttgtatttttagtagagatggggtttcaccgtgttagccaggatggtgtcgatctcctgacctcgtgatccgcacgcctcggcctcccaaagtgctggaattacaggcgtaagccaccgttcccggccaaaagaacatcttaataatcccagaaagattgggcgcagtggctcatgcctgtaatcccaacactttgggaggttgaggcaggtggaccacgaggtcaggtgttcgagactagcctgaccaacacggtaaaaccccatctctactgaaaacacaaaaattagccaggcatggtgatgcatgcctgtaattccagctactcaggaggctgaggcaggagaattgcttgaacctgggaggcggaggttacagtgagctgagactgtgccattgcactccagccagggtgacagagtgagactctgtctcaaaataaataaataaataaataaataaataaataaataaaataaccccagaaagaaactcccttcttgtgatatcaagtacatctccctcctctcagccaatggcaaccattattctactttctgtcttgatggattttatctacatagaattgagggaagagagaacttctcatattgttttatattgttttatactcagtacctgttttaagaaaaaacaacaagaaagtaaaatcaaagacaggcagcccggcgccaggcccgaaaccaggcctgggcctgcctggcctaaacccagtagttaaaaatcaactcataa

SEQ ID NO: 449 - DNA, 1002 bp, Homo sapiens
ccccagcctggggcctctgggagccttggtcctgagcagccaacacaccagcccagacagctgcaagtcaccatggacgctgaaggcctggcgctgctgctgccgcccgtcaccctggcagccctggtggacagctggctccgagaggactgcccagggctcaactacgcagccttggtcagcggggcaggcccctcgcaggcggcgctgtgggccaaatcccctggggtactggcagggcagcctttcttcgatgccatatttacccaactcaactgccaagtctcctggttcctccccgagggatcgaagctggtgccgaagtatgggctcctggtgggcggggccgcctcgcaccgctacgacctgggagggctggtgatggtgaaggataaccatgtggtggccgccggtggcgtggagaaggcggtgcgggcggccagacaggcggctgacttcgctctgaaggtggaagtggaatgcagcagcctgcaggaggccgtgcaggcagctgaggctggtgccgaccttgtcctgctggacaacttcaagccagaggagctgcaccccacggccaccgtgctgaaggcccagttcccgagtgtggctgtggaagccagtgggggcatcaccctggacaacctcccccagttctgcgggccgcacatagacgtcatctccatggggatgctgacccaggcggccccagcccttgatttctccctcaagctgtttgccaaagaggtggctccagtgcccaaaatccactagtcctaaaccggaagaggatgacaccggccatgggttaacgtggctcctcaggaccctctgggtcacacatctttagggtcagtggccaatggggcacatttggcactagcttgagcccaactctggctctgccacctgctgctcctgtgacctgtcagggctgacttcacctctgctcatctcagtttcctaatctgtaaaatgggtctaataaaggatcaaccacatggg

SEQ ID NO: 450 - protein, 230 aa, Homo sapiens
MDAEGLALLLPPVTLAALVDSWLREDCPQYAALVSGAGPSQAALWAKSPGVLAGQPFFDAIFTQLNCQVSWFLPEGSKLVPKYGLLVGGAASHRYDLGGLVMVKDNHVVAAGGVEKAVRAARQAADFALKVEVECSSLQEAVQAAEAGADLVLLDNFKPEELHPTATVLKAQFPSVAVEASGGITLDNLPQFCGPHIDVISMGMLTQAAPALDFSLKLFAKEVAPVPKIH

SEQ ID NO: 451 - DNA, 1196 bp, Homo sapiens
ccccagcctggggcctctgggagccttggtcctgagcagccaacacaccagcccagacagctgcaagtcaccatggacgctgaaggcctggcgctgctgctgccgcccgtcaccctggcagccctggtggacagctggctccgagaggactgcccagggctcaactacgcagccttggtcagcggggcaggcccctcgcaggcggcgctgtgggccaaatcccctggggtactggcagggcagcctttcttcgatgccatatttacccaactcaactgccaagtctcctggttcctccccgagggatcgaagctggtgccggtggccagagtggccgaggtccggggccctgcccactgcctgctgctgggggaacgggtggccctcaacacgctggcccgctgcagtggcattgccagtgctgccgccgctgcagtggagccgccagggggaccggctggactgggcacgtggcaggcacgaggaagaccacgccaggcttccggctggtggagaagtatgggctcctggtgggcggggccgcctcgcaccgctacgacctgggagggctggtgatggtgaaggataaccatgtggtggccgccggtggcgtggagaaggcggtgcgggcggccagacaggcggctgacttcgctctgaaggtggaagtggaatgcagcagcctgcaggaggccgtgcaggcagctgaggctggtgccgaccttgtcctgctggacaacttcaagccagaggagctgcaccccacggccaccgtgctgaaggcccagttcccgagtgtggctgtggaagccagtgggggcatcaccctggacaacctcccccagttctgcgggccgcacatagacgtcatctccatggggatgctgacccaggcggccccagcccttgatttctccctcaagctgtttgccaaagaggtggctccagtgcccaaaatccactagtcctaaaccggaagaggatgacaccggccatgggttaacgtggctcctcaggaccctctgggtcacacatctttagggtcagtggccaatggggcacatttggcactagcttgagcccaactctggctctgccacctgctgctcctgtgacctgtcagggctgacttcacctctgctcatctcagtttcctaatctgtaaaatgggtctaataaaggatcaaccacatggg

SEQ ID NO: 452 - protein, 161 aa, Homo sapiens
MDAEGLALLLPPVTLAALVDSWLREDCPQYAALVSGAGPSQAALWAKSPGVLAGQPFFDAIFTQLNCQVSWFLPEGSKLVPVARVAEVRGPAHCLLLGERVNTLARCSGIASAAAAAVEPPGGPAGLGTWQRRPRQASGWWRSMGSWWAGPPRTATTWEGW

SEQ ID NO: 453 - DNA, 150351 bp, Mus musculus
  misc_feature (1)...(150351): n = A,T,C or G
nctccctccctccctccctccctccctctcccttccttccttccttccttccttccttccttttctttttgttttttgtttgctttctttcttttttgagttagagcctcatgttgtgcaggttggtttgaaactcactgtgtagcacaggctggccttggtatcctgatcttcctgtctccagctcctaagtgctgagattataaatatgtgccaccatgcatggttcatatcccttttaatagtttgtttaagtgtgtgtatttcctaaggtattacttagttctttctaaaaaatcctaaaaaattgtctcctgtctttaaaaaaagttgtagtctgttctagattactttctgttgctgttataaaacaatggctgaacgtatcaatgaaataaaagtaaggttttatttcagcctacagcttgttacactctatcatcaaaggcagccaaggcagagctctaggcaataactgaagtagataccacagatgaaccctgcttactagcttgcttctcctgacttgctcagctattttttgggggttcaagacagggtttctctgtatatccctggctgtcctggaactcactctgtagaccaggctggcctcgaactcagaaatccacctgcctctgcctcccaagtgcgccaccactgcccagccactcttcatttccaaggttcctccacgctgttgattggagcagttgcctgttttcaccattatatagtattgtgttaaggaagcgcttgcgtctgctgtcagagcacttacattgttgctgctgtgaatgttcttgaacctgtctcctaaaacacaggaaagaatttatacaaattgttttgatggagtttccactacaacccaagtgacagctacattttgttcaattatttcatgctatcagcagctagcaatcttacacttccatgctacaaagttactactaaaaacagtaactatttagtttacttcctaggtcaagatgtgtagaggctggattggtagcttttccatgtgttgtggtttgaatgctcagaccccagcttgtggggagcttttacaaggtacctgagcgctgctgatggaagcagggtcactaattagcctctatccgtgtcctcatttaaccctctctgcttcctcatgctcccacaaacacaggaagatgctccagttgccttgacttccctgcaggatggattgatatcactctgaaaggatgggcgcacagaacttttcttcttatcgttgtttgggtcagtgttctgtcacaatgatgctaaagtcattagtacactatcttaaaaaaacagaaatatatataaaaagatagaaacctgtttttcttgccttctaatttaattaaactgttgtcacagaaaacattctattcagggctgagtcgatgctcagctgatacagtgctggcctgaggacctgagttcagatccctgcactcatgtgaaaagccaggctggccacacatacctgtacaacggccaggttcagtgagagacctgggggtgagagggacttccaagtcatcttggactaccgagctaggccttgtctcgataaagaaaagcaagcaagaaaacctgtatgtaatttttgcgatggaagaaaatgtaaaatgagcttttcggggatcgtcacggaagagaaggcagaaagatcgtaagatccagagggagtagatgtctgcagcaaaacagtgtctgctggccctgacagcacagaactcacatgcccggaccgcatgcacaagacatgcacaagctcaggacggcccaagtcccagcacggactttgtttgaggaactactgggagttgatggcttctgggggtgggggtgtcggttttcttcagagatgtgggtggactctgagaagctacatgtgttccagtaaatgatcacacacccatgcacgttaaatagactcagtggatattttgaagaggagagagagaaaaaacacatgcagttggtgtgtggggtggattgggtaaacaagggagatattggaggggaagggatggggggtggacttggtccaaacacacagtatataatacgaatattgaaacagtaacagatgaatcgttgggaagtttttcagaatgaacccttgttgatacagctgctacagttcttttttgtttttttgtttgtttggttttgtttttgttttcctgagacagggtttctctatatagccctggctgtcctggaacttactttgtagaccaggctggcctcaaactcagaaatccgcctgcctctgcctcccgagtgctgggattaaaggcgtgcgccgccacgccgggcaagggtgatctttctagcaagagcacagcgggtgctgcaagtaaatgcacatatactacaggcagcccaggtagacccgaactcaaaagaaaggaagtccagccactatcagctccccaccacattcttcattcactcagggaaagggtgggatccttattcactagcatctgcctctgattcctcaattttcacaagtctcctgactgccgatgaagaaaggggcacttggtcctcacgcctgttccctactcagtcctctctgttttaggaaacggcaattctgtcttttaagtgtccaggccacaagcctctcttacccttttttttttttaattatttatttattattatatctaagtacactgtagctgtcttcaaacacaccagaagagggtgtctgtcagatctcattatggatggttgtgagccatcatgtggttgctgggatttgaactcaggaccttcagaagagcagtcagtgctcttaaccgctgagccatctctccatcccccctctcttacccttttatccaatagcccgtctaaaggaaaatcttgttggctgaagttctgttgatatttgctagtttctcagcactggtaccaggctaccaacagctggcttgcatcgggacgccaggcttctgaccgtgctggttagagttagttccctgcagaacagctagtggatgcttttaacctctaagcactcagctccctctgcttagaataaaagctgaagtcctcacatggcctataggggctctgtgtaatctgactctgttttctctctgactttgtatattaacaatggtttttttggggggggggctggtttttggtttttgtttgtttgtttgtttgtttgcttgcttttttgttttgttttgttttgttttgtttttcgagacagggtttctctgtatagccctggctgtcctggagctcactctgtagaccaggctggcctcgaactcagaaatccgcctgcctctgcctcctgagtgctgggattacaggcgtgtgccaccactgcccagcgttaacaatgcttttgattgtgctcatcaaacacttgcgtccttggtgttccttgattacattgcttacatttgtgctgttctttctgcctgtacgttctttactctctgtgtgtctgagtaaatgaatgccgtgtgtgtgtgtgtgtgtgtgtgtgtgtgtgtgtgtgtgtgtgtgtgtgtgtatgtgtgtgtgtgtgcgcgcacgcgcccttagaggccagaggaggatgtcagaactcctgcaacttcagttgccagcagctttcagctgcctgatgtggatgctggaaaccaaacccgaaacctctgaaagagcagcaagtacataactgctgagccgtctttccaggtcctccttttttcctttttttttttttttttccctgctggggagcaagcccaggacctcacatacgttaggcaggtgctaatcagttagctacataatgactacctttttttgctgtggtgggaatataaccatacaaggaaatttaccattttaaccatcttgaattagaatccagtggcaccaagtgcatccgttgtttttcagaactctgccgaccaccgagttccacttttatcgtcacaccgaccagaagctacaccttgaatcaatgactctgtactccatactcccctcctctactctctagtatcttccagtctactttctgtgtctatgagcttgactactctagctacctcatgtgagatcatgtgatgtttgtccttctgaaacaggggacaaaaggcaaactctgggctcttaacctgttacaaattaaaagcacagtgtgtatttcccctgcctgctttctgggagcttgtagtaagacagcttaagtcacaaggtctgaatgtttgctgacggagccccttatgaccaagcctagctaaagcccacataagctatctagcttccctggctctcggggaatgtaggtgggctctgggaagctctgcacgttcctgcaagctgtttaaagagatttgattgcctctgcctcctaagcgcaggtattaaattaaaggcaggcaccagcaagcaccacctacacaaacttttttgttgttgttgtcgtttgtttcttttgttgttgttctttgttttttgttttatcgagacagggtttcgctctgtagctctggctgtcctggaactcactctatagaccaggctgaccttgaactcagaaatccgcctgcctctgcctctgtctcccaagtgctgggattaaataaggtgtgcaccaccactgcctggcttgtttgtttggttcttgagacagggtttctttgtctagccctggctgtcctaaaagttgcttttgtagactaggctggcctcgaactcagagatctgcctgcctctgcctcctgagtgctgggattaaaggcatgcgccaccactgcccacggtacaaacattattttcttaccaaatataggacttgcaaatattttattccgttccattggttgtctttttattctcttgatatcctcctggctttgttgctcacaaattgtcatctgacaaatcactccccaattaattttctcctatgctttctgtttgacacttttaaaaaatatatgttacaaatacctgagtgagtttaaggggataggtttacttcagctcatgattgcattccataggtatctggggctgttgggagggcatggtggagcagagagcaagatacaggaaagggctgagatgccccagtggcctacttctctcagctaggtccacttcccaatcatgttatcatactatgaatccacccaggaattaagccctcgattgattcagagttatcatgagtaacctctcagtgatctggtttccccatctggggaccatgccttaaacacatgaacctctttggaggatatttcttattcaacccacaacactttctcataaaagtcctatcattttggctcttaattctaaatccttaatccatcttgtgttagttttcgtatatatgtaatgaacagtccaactccattctttcatatgtatttagttttttaaccatgtttttcttttcaaagatttatttatttattttatgtatgagtacaccattgctctcttcagacacaccagaagaaagcattggatcccatggtggttgtgagccaccatgtggttgctgggaattgaactcaggacctctggaagagcattcagtgctcttaaccactgagccatctcgctagcctttctatccatgtttttaacttatttgtctattgtctttttttctccaactagaacttaagctccagcaaagcaagagttaaactatttctgtcactgccatatcagatcaattatcttgctatttatagtaccttgacatttaatgtgtcaaacaacaaggtttttaaggtttctaagtgtcaggaactctgtattagttctctgattacgtcttcctctccagatgtggtcagtttggggccaggactggagtccctgaagcatgggtgggttgaaactgagagaagtaggtcacttccaaggtggatcattgacacagccgccaagttggttctgattgttgctttagatttatttatttttttatgtgtagggatgttttgcctgcacatctgtctgtgcatcacacgtgcgtgtgctcaggaagttgtaataaggagtaggatctcttggaattggagttacggttagttgtgagccatcataaaggtgtgggagaattgaatcagattctctgcaagaaaaatcaagggctctaaactgttcagccatcgctccaagccagattctgaacgtaataaaatgtattcatcatttgttcacatggggcacacgttccacggtgtgcacatgagagggtcacctgtgcgagccagagaggactgggtcatcaggctttcccagcatggcctttatctgctatcccgcaaactgattgcgagttttggtggggtttctgtgtgttcttttctcacagagcaggtgaacttaaaaagaacaaggtgaaaagtgcagtgacgaaggtcagaggtcacactgtggcacgtccgccatgttctatttgtctgtggtaaagatcagcttttattccgtgtgagagacacgaataacaggcaacaaggatcacaaaaggctggatttgttggtgtctgtcatatgtatctgatcccaatagctagagaaatgcctagtgcaatatattaaaaatgtctcataggaactggggaagtagcttatctcaggaaatgcttgcccagcatgatgacaccttgggtttgatccccagaattgcataaatggtgcatggtaacccagacccatgattctagcattcaagatccagaggctgggggatcagaagtttaacatcatcgttagctacataatgagttaagggcagcctaagctacctgagaccctgtctcaaaaactagccaaaaactaaccaatcaactaaaaacaacagcaatgacaacaacaacgacccacagttagactgtttcaaaacaaaaatgacaacaacaaaaaattttaattaaaaaaaaaaaaaaaaagccgggtttggtggcgcacgcctttaatcctagcaggcagaggcaggcagatttctgagttcaaggccagcctggtctacagagtgagttccaggacagccagggctacacagagaaaccctgtctctagaagaaaaaaaaaaaaaaagccagatggtggtggtgcaaatctttaatcctctgggagacagaggcaggtggatctctgtgagcttgaagccagcctggtctataaagtgagttccagaacagctaagtgtacacagaggaaccctgtctcaaacaaaacaaattaaaaaaaaaaaagaaaaaaaaaaaggatgggtttatgcatcattcaaacgttgttgggaagtttatggtcttgaacaaagagaaaagcaattaaagtttaggagaggcagacctggctggaaacagccctccttgtgtttgggttttctggcttctctgagaatagctaagctctcctcactcacatccgtagcacttcctaatgtgagaaccgggattttacttttcttgttgtggtttgtagactttcaaggcaagattctcccaatgacacagccaaggagctcaggttctgtgaggagaccacatctgtgataagcacaccagagggatgcagacagtgaaccagtacaactctctctgccaggtgaggtatcccttctgtattctccccccacactgcatctccatattaaggaacatacatactgttatccatttatttcttacattcatcttttaaaagtatttacttattgattttatgagatgagtgttttgcctgagtgtgtctattatgtgagtgcaggagcctgtggaggccagaagagggcgtcaaagtcccaaacacatgttgggaaatgaacctaggtcattttaaccaaaccatctttccagccccttacatttctttgtctttaatcacattatattttcttatatcagattgtgaacacaggtactgcatttttatagctccaaatgacacaggtttcatcatccaaggagatctaaacttgcatttgtgttttcttttactgtcaattgtcactatgggtcagccacagttttctcaacttagagaaattatttattttatgtatatgagttattttgtcttcatgtatgtctgtgcagcctgtgaatgcctgtggccaaaggaggccagaagggggtgaggggtggatctcctggaactgaagttacaggagactgtgagtttccatatggctgggaattgaacctaagtcctctcaaagcactcttaaccgctgagccattcattactccatcacaaccccttaagtgggtctagtaatgtccattttgtataagtgcttgtaatattattatccaactgaaaatgtgacttattgaccttccttttaggaaagtgttaggcacagttgaacaccatattcatacatgcacacatgcacacatatatacagacctccatctccaacaagggacttaaaggtagctaaaatgtcagaacttccctcctctcacacacacagaccctcacaggcatcttcaataccagaaccctaccccagttaactgcttacctcttttcaggaggggtcacatgggcacatgaggattgtgagcctctcaaacctccttctgggagggaatgttaataggaatgttagtcatgtgacagttttgtgcctgtcatagttacagctattctgcttctagataacctctacggtatcttctcggtgacagagtaaataaataaataaacaaataaagactttcttgacatttacctgagaatggggatagcagaggggttaaagataaaggttacagagctagaaagatggctcacaggttaagaacacctgttgcttttgcagaagccttgagtttggttcctggtacctacagtcggcaacttacaactgcctatagacccagggcatttaagccccagcctttacaagcaccggcattcatatgcattcatatgctcatacagataattttttaaaaaaagatttgtttattatatgtaagtatactgtagctgtctttagacactccagaagagggagtcagatctcattatggatggtgtgagccaccatgtggttgctgggaattgaacttgggaccttcagaagagtagtcagtgctcttaaccactgagacatctctccagcacctgaatgcagaattttaaaatagatttaggtgatagatttaaaaatgctactgggtatggtagtacagactcatctgtgaccccaggcaaggatatcaggagttcaaggccagcctccgctatatagaaagatcaagcctgccttgaaatctgtccccaaaaccagactaaagaaaagagagaaagagaagaaaaaaatgattccatagtgctcagcgcataagtgctttaaaaaaaaagtcatcattaaccaggcaagtcttcgaagccaaccctttggatctctttcaggaagatggagctctctttagggttgtcccccataaggtctacaagttggtaccacaaagtctctactgatggtctctgagtaacacttcaggggagtattgtggggggtgatgtggagtggggcatgggggtgagggagagagagccagagacagaaagagacagatatccagttaataatttgtctgaggttaaagtccaagctgacagaatcaaattagacaagcctctaggcagtgcctcaaattggcacctcagtcaagatcattctgacagaagtcaaaaaggagggaaggagggagagagggaggaagggaatggggaggagaagaaaccaacatctattagtatgcctggnnnnnnnnnnnnnnnnnnnnaaaccaacatctattagtatgcctggcatattcaaaggctttgcttttagttttcctaaaccccccccccccaccctccccaattcccagcctctcttaaagttgctaaacagagctaccagctggaactgaaagggtgttgaatgggtggagcccggaggctgcatcgatgtaaacactccctatgagtcagctgtaaattcaattcaaatccccagtctcctagtctcctcctctcatcatggttaccaccaaaatgactgctgcctttagaaaccctaataggagacaggtaaatgtctaaacatgcagtttgttatttttttttttcttttctatagtgctgataaagatgcagttattgcagtagggaattttaacttttactgagttaggatttgtgtgccttgcttcatctttaaagcacagcagctgtttgtgaatatgtctttggctttattttaagaatattatctcattgtactgtggccattcatgtgagcagcccggagttatataaagtggtaggtttatttccacaccttcaagaggagtgttttaataattagcttttgtacttcaatagttcctttccctgctgttactggctgctgggatttattttacttatttaacaaatagaggcccgctttgtctgtctaggctcctaatttctcacacagagataaaaaaaatgagccaaggaatatgattaccatactatttattcataaattctagtcattggcattgttggtgactgtttctttccttaggtgttccttgtgcttaggaatacaggccactgaaaaatccaaatttattttactgtaaggttgtcaggcatggtgggttttgcctgggaaatggaggcaggggattagttcattaaggttacaccagctcatagcaagtttggggccaatttgggttacataggcttctagttggaaatgctataaagcaacagtgggttttgtttgggtggaaacaaggaaagagataatttacactgaagaaattctgtccccggcttgacagataaagaccatttcatgtgaagtagaagtgtatctctcgacgcatctgtctcggtgggcggacttaaccttctgcttttcaggctcctaattttgtgtatagtgtgtttgtgaatgtgtaaatgcaggtgcaggagtgcctcagtgcacatgtgggggccagagcacagctttgttctccttcttcacccaggcaggatcccttcttgctttgctctgcactccagcctagctgatgaatgggagagccttccggctgattctggctctgcttttcgtctcagagcagaagtggagggattgcataggctgctatttatgtctttttatgtgggtcccagggacagaatgcaggcggcctggcttgtacagttagtgcttttatccactgaaccgtccattgctctggctaaactcttagcttcatttggctgatgaagaaacagagctgtataagattagcttccaaacaactagcaggtggtggaattaggatttttttcccccctagttcagagtctttttagtatttgcacttgtactttgcgactttggaaaacagcaattgcagtaactaccacctgctgggtgtttatacgctttgcatatatgctccacttaattatcagtttagtgcttcagtagatattactgactgttttatggatgagaagattgagatatgaggaggttaagtatacttttgccaagtacactaacattttagatcacagcctacagtcatgtgctgtatggaatgtggaagttatgagttctcagaaaattggctagtttaggtgaaatgagtaactctagttgcatcaacctttatcttgctttaaaacagctagttaagccgggtgtggtggcgcacgcctttagtcccagcactcgggaggcagaggcaggcagatttctgagttcgaggccagcctggtctacaaagtgagttccaggacagccagggctatagagaaacgctgtctcaaaaaaccaaaaaaaaacaaaaaacaaacaaacaaacaaaaaaccccagctagttaagaaagccaagcaataaacagacttctgttatcgggtggtgtcctgtgatgtccaattatgcggtacaatttcaaaagttgttatttggtttgacagagcgtaaaggtagctgcacctcaccaagcaatgttcttagccgtcaaatgtgaagtttgatgtgcagattcttagaactggtggctcgacaccttgcctataattccaggtcccagaaggcccagacggagaatgctgggagcaagccagaggagctgcatcagagagtcctgggttcagttaattaggaggagggtggttgagggggcctcccagtctcaggcctccatgtgcatccacacatgtgcacactcacgtgtgaacaggcatccacatacgcacacagactgcatggacagacacgtgcacaaacaatgtctaaagtctgtagctacaactcatctctgtacattcatagcagtctagtggctacctccacaagaaattgcaagcatatgctctgtgaagcaatgttctttcctaaggcgatgctcctgtcttacagtcagtggatacggtgaaggaaaagtcctgagcgtgaagccatttttagaaccccggtaagtggagaggccccagcttttgtgcccgagtatcttagattcctattgtggtaagtaaaatgcctaatgaggtgtgatgtaactgtttcagagtgagccttcatttttttccaaaacaaaaaagtttcaaccatcatctggaaccctcggcggagttctttgttcttcgtcctgggacagtgccaccagtataacttcccacagatggcaatgttctgtctgtggtctcctggccacaggtgctgttactgaacttggaacgtgtgagtgtgactgagaagttgaagctgttgagatgtaagcatgtggctattggcttttgtggccctcgaattagccagtgcaatcctagaatagaaataagtgtccttgtttagggtaaaattctcagggtgaaggtggctgatgagttcagcctctgtgtctggggtgacttgacctctctgaagaatgcctcctgtgtttctatcttttcgtttttttcccttttcttttttcttttttttttttttttttggtttttcgagacagggtttctctgtgtagccctggctgacctggaactcactctgtagaggaggctgacctcgaactcagagatccgcctgcctctgtctcccaagtgctggattaaaggcttgcgccaccactgcctggcgcctcccgtgttatcttttggggaccaaagtggttcatatggctggcttgaacacctttggcagttaacgtcatggttttctgtgacttaacctttggcaggtttagaggagcttcctgcctgcgtagtgacctaactccatgctcagggtctgcaggatggaacacagaactttgaattgctaactgacttgactgtaaataaaagcgtcctttgcactgctgtccgctgccacaggtcctctgaatcttccgtggaagggtatagactagaatctagactttagagagtaagcatttgagccttaggagcagagatggtgtcagagtagaattcacacagtggaatatcacttacgccagtgcccaagcacttgtgagcgctagaattagcaattaaagtggggcattaaagtgtaagctcttttaccaaataaactgacactcttggggcaagggagagaaaggcattagtcagggataatgctggagggccagagctaatggcctcctcaggactattctattattttgagagcatgtatttcaaaataattccactgtcacatgctgagcaccacaaactgtttctcagccctgccaagactgtttccaccacattcagttttgcctcctttggaattccacatatatagaatcatatactgtataccctggtatcatttatttccaaattgatagttcattcacacactttcaagtgaaaagaatactactttaagcctttgaatatacataaaaagatcatctttcccatctctggaaatgcttcactcttagtttccctaccttgcacgtttggaacaaccagtgttcatcgttccgtgagcgtccgtggctatctttctctcagtccttcttccagtgttcttcgttccttgagcacccgtggctttctttctgtccttctttcactgttcatagcttaatgagcatctgtggctatctttctctctatccttcttaacggggaggtttgagcactctgcaattagacatttcccaaagaatcttcagacactaaagtaatttgaaatctatttttattataataataaccagcgctcttcttaggttctgactctaaatgtcaaagtgtgacatttacctgtgatgtcagtaacctttgtgccattcgtcatcgtttgaatcaggcacctatgattctcgaattcctcaaacctcaaacgacaaagctcccggccttatggggccagatgttagtgagagattaaaaaattcccaagagtcctataattacagtgtcctggaaagggattgacaggactaacataggcgggttttcaagaggcatttctcagacccagagactaaggcccaggtaagaaggtgaggccaggaaaacttcccaggtattagaagtttgcaaaaactcttgtgagggaggaaagggtcattgtggctggagaaaggagaggatgaacatggtctgagcagagaggggagctggagaggtaggcaaggtgcctggccctggagggcttggttagggtaatttttttttccccaaaagaatgggatactgaacagcaacaaggtcacatggtacagtatttgaacaaaaattcttcttgtggtttgagatttggagaagggtaggaggggatgtggataaaataggctaggtcagtgtccttacactatctgcaggtcagggtaattttaactaaggtggttgctgatgaaggagatgagagagattcaaggaaactttagcagataaaagcaaagaatttgcagataaattggaaaggtacattatacttttttttcttttgctatggggtagatacattaaattatgatgaagttttttgtttgttttttgagtcagggtggtgttgccttggctctcctgaaactctgtagaccaggttggccctgaactctgagatctgcttgcttctgtcactcaagtgcagggatcaaaggcatgcgccaagactgcctggtacaatgaagttgttacattgccattaataacccgacctaagttatgcaaaaaaaaaaattgcctcagactattttgaaaatttcaaagctgggtggaggacatggttttacttcccatttcttatcctaatcttgttgaaaaatagtcttttctagaagtgcttgtgatagtggaactttttctggacagatcttacaaatctaaatgtaaaaaccagtggtatcagattagtaaacaattttagagcttttctgactgcttgatggtaattactatccttttggtcactttcaagtatataacaaaaatgatttatattgcctttattatttttttgttgcctgcaattcctttgacaggacccaaatgaataggctgtttttgtcccaaactaagtaatttccttctaagaatttcttggttggtgttggataattgcccaccctctgccggactccgaataaacccacggtttattctagaggattagtggaagacctgttttaccaccgcgagtgccatttgattaatattatgtttttgggagtgagactccgggcagccctcgcaaagctgcgcgtcgctgtgcgcgccccaggcctgcgcggatgctcgcccggggggctccgagggggcgtgtcttgtgcttccctgactggccaggggcggctcgagagactgggaagtcagcagtttgcatggccgagggctgggcgcttgggaagaggggcggaggaccgagagggatctccccgcctccgttcctctcggtccaatcccttcggcttctgcttcggcttcgccagcgcggccggggccctaacnnnnnnnnnnnnnnnnnnnnnnnnnnnnnnnnnnnnnnnnnnnnnnnnnnnnnnnnnnnnnnnnnnnnnnnnnnnnnnnnnnnnnnnnnnnnnnnnnnnnnnnnnnnnnnnnnnnnnnnnnnnnnnnnnnnnnnnnnnnnnnnnnnnnnnnnnnnnnnnnnnnnnnnnnnnnnnnnnnnnnnnnnnnnnnnnnnnnnnnnnnnnnnnnnnnnnnnnnnnnnnnnnnnnnnnnnnnnnnnnnnnnnnnnnnnnnnnnnnnnnnnnnnnnnnnnnnnnnnnnnnnnnnnnnnnnnnnnnnnnnnnnnnnnnnnnnnnnnnacccgggccgccgccgagtttgcggcgcgagcccgccggggcctgcgttccccgctctcgcctggcccgggcggcctcggggcccgtcctcgaggacacggcggtccgccgcgccctgctcggaaagttggcgtctccattcggcctgcggcggctgccggcaggtgatgggcgagccaggtgtgcagagcgacggcgcacggagctcctgtgcacccggttgcccatcgcctaacggggctagcctgagattaaccgcgggtttccggtgggttggcttgcggtggtggcgcctgcgctggtgactccgaccttaggtcttttcaccaaagagcgaagcaaaagttctggaccggttccctcgcagtcccgtttctgctggaggggattttgaagagcaacaagcggttttctttggagaataataaacctttctccgccgagagaatgaattccagagcttcctgaagttagagaaacatggtctgttggtagtttttaatctttgcgcggtgtttttttttttttttttttttttggtgtgtgtgttttaaattttattagtaataatttctcagtgttccagaactttgcttcctgtaagacagaaaatgctcaccttctatgagaagtttgtgtcaaggaaatcttagaaaatttattcaagtctatctggagtagaaagatcacaattttaagttttcaggtaatgatttttaagtgaaccaacacaaaccaacaaattactaggttgggatatatacctcggaggagtggaattgctgttttttttgtttggttttctttctgggtcagagttttgctatgtagcccaggctgtccccgtactcctgccgtcgacctccttgcagtatattgtcactatttctggttgattattttttaaaaatttctggcattaggttctgttgggccttctcaagacggttgagaactctagttattccatacttaagatgcttaccatcttcaaaaaatgctgcgatttggatggtggtactttatcagtgtgtgactttattttgcctggtgaatgagtttaaaaatattagtcatttttgtattaatcttttgtgaaatgcctcttttacgaattatgcttaggtttttgttattttacttttcttttcttttttttgtttggtttttcgagacagggtttctctgtgtagccctggctgtccttgaactcactctgtagaccaggctggcctcgaactcagaaatccgcctgcctctgtctcccaagtgctgggattaaaggcgtacgcctggctattttacttttctattgtttttttagttctgtcttttgttttgttggggacagaacctacatccttgcatgagcaactgtgttaactttccaaggtttcttttatcagtggtctgacagtatctgcaaaattccagaaataaacaacttagaagtcttaaatttttctttaaattgaacttatttaggtactctcgggcaggcccctttctgaggacttgatacagattagctcacttagttttaagttacatgccttttggagtagctgaacattaagtgggctgctaattactcctttgtccagcatatctagttagttactcagtaaccattggggggttgtcagatggactgctttgccatctccagcttgtgctcaagggtcccttattttactaataatggccctaagtgcaagagtgcttccttttgtatgtgccaaaagtggggctgtaaaaaaaaaaatgctcctttgaagtgaaagtgactattgttgacttaataataataaagaagttgtgtggtgtagatgttgctaagaacaatcttcagtctgtaaaatcatgaggaaggataaaggaggagttgtgatagttttgtgatagcatttcagcatcacagcacaaccacactgatgaatttcagaggaaggtgctctgggagcttctggggagcactagatgtcttgggatgtatctcctgtggacaaggggacctgttacacacagctggctgccagtgttctgaaagctgggcagaggaagtgggcagtgggtggctgctgttggctaaaaacacttctgcttaatcccttggctttcagccttgaacttcactctgcttggtctggagttactccacgttagtgtttccaggaataagtcatgagagggtaggaatggagtcctagaaagcctagctgtacccttatacaggctgaccctcttagcctcttcaacactgaccttgggtaattcaggtccttagtctttctgggcttttgtgattggccctaaatagttgcttccttaaccataggtcttcattcccatttgtgagcctgaaggttcagcttcctctcctctctcatttgctcattcatctcttatcttgctttgtgtgtggatatcttgttttttccccggcctgtctctggaaggtaaagatagcttctttaagttgtgttttctttgcttagtttgcttcctccaagttaactttcaacttggtattactgcttgattggtagggggtcttctcatgactggctggcagtctcttgtttctctgttcatggttaagaaagagcgcctgacagttaatcagagggaagaccagagtttataaataggagctactaacgtccaggtttaccctataagcctgtttcaggcaaaagttcttagctttggctgtatcttagaatctcatggagagcttttaaaataatgtccttgtcattcatgactgaatacatcagtatctctcgggataggacccatgcagtattacttgtaaaacttgatttattatatagggtaaaattcacactactaagtatgtggttttgtggtttcaccatatatacctgatgcagactcagagcagtgggagttcttctgtgcaccgttggttattcagtgtacctattttctgctcagtggttgtagtggcttttcctggttgtcagcttgatgatatctggaatgaactacaatccagaattggaaggctcaccagtgatcctaatcttgaggctgggagatacaagtttctgacctggatcttggcatggagatcttgaggcatagtggctatgaattccagaagatttagacaggaaggtctctgagttcaaggtcatctcgcacacacctgtaatctggaccacaccttctgctggagacctacataaggatgttgtaagaaggaaggccctctctccatctctatctccctctctccctctccccattgcctgcttgccttgtgggacggagcaactgttagatccttggacttccattcatagctattgctgaccattgttgggaattgggctgcagactgtaagtcatcaacaaattactatatagagactacccaaaagttctgtgactctagagaaccctaatacagaagtgtctgccattttgagttctaggttcagacaaatagtgtctgaatattttacttaaaattttattagctgagcagtggtggtgcacgcctttaatcccagcacttgggaggccagcttggtctacagggtgagttccaggacagccagggctacacagagaaaccctgtctcgagaaaaacaacaacaacaaactttattgttcgagtttgtatttctatgtgtttgtgtgtatgggtatgcatgctgtgctgtatgtggtgggcagaggacagccttttgcagtgggttcttccttctacttttgcatgggtctggtccttgagcggtgtgccaggcttggatcagctccatgtgtgtgtttctgtctctgcatttgttctggaagttcttcagcttttgagaattctgtggtataaaccgagtttgttctcatactcgcttagttttctatagcctctggaaatggcgatagttgtctgtctgtctgtctgtctctctcttttcctgttttccctgaccttactggtttgtgtcttaagagcaacagcaaaatttcattttctttcttcacacatatccttttgtgtggtgtttatgtgttcatgtgtctgtgtacacacctgtagttatccttaaattgatttttgagacagactctctcattgaatctggagtttactaatcagcaaggctagccagcaagctctaaggggaacctcctgtttctcatctccagtgccctgattatagtttcatgctgctctgtgcccagctttttctgtgcgaaatgaggatttgaatttaggccccagggtttgtgctgcaagcacttgacaactgagctatcttactagtcccagcaaaactatcagtgttttagccgtgtttttaatgaagaagcaaactaggttgtgtgttcagtctgcactcttacgtggatgtgtcccagctgccttgtattattatacatccgtgttgccatttacctccatgcctgtcatcttccctgcttcacacattttgtttggttttggaacagttaccaagctaggctgccaggaggtagatgacttatgctattgatcaaacacctcccgctttgccttgggctaggctgaccttgaactcctgaccctcttgtcttcatctcccactactgaggttacaggctgttaccaagaccagccctgttctcagattcattctttttagaagtgctcattgttccagaatcttccagtgttagaaataattcagcctgatgaactatttgatgctttctctaaagcacttgttcatcttaaatgtgagaaagtcaggtaagagatgagaaatatgtttgggtatctggaagcctataaatctacattgcattaaccattgaatgaataattaatagatttgcatatttgtaatatgtaatattaaaacttattgaaaagttaggatggttttgccattccagttaactatacttaaaggaaagtcctgtgatagggagaggtagcattacaatgtcttattcctacatgtgagtgctctgctactacctccagacctgttgttagaagtttcacactagaaaaagtcagatctttgtcatctgttaacagttacaaagaaagcacctgtggtaggtattgtatagctcggctgtgcctctcacatccccttgccccctcttatttttttcattctttgggttttttttcttcctaaaatgtatttgttcttaccttcatgtacacatgcatgtgtatagtgtatatagttttgtgccgcactctcagaggctggatgagagagtgttggagtctttggaactggagttagaattgtagccaccatgtggtgctgggaactaaactccggtccacagtgatcttaatcagtgagccatctctccagtcccatattttaatttttgacctgtagtttaggctggcaacgaatttgctatgtagccaagattggctttgatctcctgtgagatcaagggttatgggtgtgcatgcaccattgtatccagggtgctctgtctttcttgtactctctcccctctctccttctcagggtgtctgtgtatgcagtcttgccttttctgagctcactatgtgaccaggctgtcctggaactcacagacgtctttctgcctctgctttccaattaatgtgcagcaccacactcggcgagctttttcgttaaagctcgtgaggtgggtcaatgagatggctcaggaggtgcagtatcttgatgacctgagttctatctccagaacccacatggtagaaggtgaaaactgactcttgctagctgtcctctctgtgtgtgtatgtatgtgtatctgtgtgtatccatacacacactaaaataacatatcagttttcttttcaaaacacttgcaagttgttgttgttgtttttttttttttaagtttgagacagggccttgatgtggagccctggctggcctggaacttgctatgtatgtagatcaggctggctttgaactcagggattctgcctgtttctgtgctagaattaaaagtgtactatcatgcctagtcgagtgacagaatttttgagacataattttcactctgtagttcctgctaaagtagaaagaatatgtataatatgtttcttttagatgcttatataaagtctacaccttgtatgtgtaatatgtgtatacatatttgcatgtgtgggtacacatgcatgtgcacaaagttttggagccctcctatggctttccaccttattcattgaggcagggtctcaattagacagagattactgataatggctagtctggcttgttttcttaaagcgttctgaaatttcaggcaggcctccgtgctgtcctggcatttacttgggtgctggggatcctcacacttgcacggcagtatacgatctgctgaacttctccccagcccaggatatacctttaaatgatgtcttgtcattttttttttttttgtattaaaatatccttttgaaatctgtgctgctaaatagattttttttttctgggtactatttagccaataaacctgtgagccccccatgtgctcttcttcacagtgatttttttttaaagatttatttattattattatatctaagtacactgtagctgtcttcagatataccagaagagggcgtcagagctcattacggatggttgtgagccaccatgtggttgctgggatttgaactcaggaccttcagaagagcagacggtgctcttaaccactgagccatctctccagcccttcacagtgatttttaacaagctttaacaatacaaagtgactaaggtgcttaccactgctcaaatcctgttttgctacatcacaatcatttttcttttatgtttatatgtaacactcaagatgccagtcagaaatgaccttggttggcaattactgatcaccatggggggatgatagtctttcctcataaacatgtcagttaattttgtgtttgcaggtagaccctgttggctttggtctcttcagttttctcaggaaggactgtcccctctcattcctgcttgattactctgtttactgtttgtatgccagctgcctattactggaactgtccttgagtcccttccctgccctgcagtctgcagtttattactgctcgcacatgcagccaagcgtccgtcctgcggctcatccaccctctgagggctacagacaatgccggctcagaacttgttcattgttctttgtaggcatccaacacttgcagctgtgttctgaaaaatgttctaaaactgggtaaactggccctaatctgcgctttctttgttggtttccttttaatggtcttgcaagttcattattaggattcctgaaggaccgtctccgtctgtgttctagatctgtaatgagagttagcatggacctgacttcctgggataattgttttctggcctttatttgttcacgggaaaattttataaggcactggtgtgcaaatgaagatgtgggttttgactctgaattgttgctgaaatgatgtgttgctatctttgacccagtatattttgtcacgtcaaagtttttttttttttttttgatcttattattataagagggcatcaggggctggagaggtggctcagcgggtaagagcactgactgctcttccaaaggtcctaagttcaaatcccagcaaccacatggtggctcacaaccatctgtaatgggatctgatgctctcttctggtgtgtctgaagacagctacagtgtatttacatataataaagaaatacatctttaaaaaaaaaaggagggcatcagatctcattacaggtggttgttgggatttgaactcaggacttaaaattatagctgaccttcttatcagtgactgacagttgattagatttattttagggctgatattaggtggctcaagcatttattagctaaggcatgctggggaagttgttgagtttcacacttcagaaaaatctatctcagtgaggattaaataagacatgaatgtaaaatcctgactgaggacctggcacatagtaatgctgatagatgagtgtggaggcgcaagctggcgctgtccattccgttcaggctttgcttttccgaaatttagcttcacagtgatgttgaaggaaaggaactttcaccactgttgtgttgtttcttgtttttccctttttccataatttctatgaatctttagatttttttccccagtgcttgttgtatttttacattccacttctcaagcagccattagcttatataaatgacaggcatagtttcagccctgggatgtgctggccattcagtagtaataacattgaaagcctagttttgtttctgttactgagatcggacctcgagtattctgtgtgctagagtgtgctctacactgaatgtatgtaccctttggctctgaaagacatagttcttaaattcttttttaaagacttacttatttatatttatattacttatttatatttatattatgtacacgtgctctatctgcatgtacacctgcaggccagaagagggcatcagacctcattacagatggttgtgagcctccatgttgttgctgggaattgaactcaggacctctggaagaagagcaactggtcctcttaagcactgagccatctctccagccccagttttaaaattctttttttgtgcatatttacaggctgatttaaaacttatattctcagtttgtagtattgcaaataagacgataaaacaaccagccccctccattccatgtattgagaatgcttctgacatgggagatattacagtttttttttatataaagtttttgttcctgttaattaaccacactaattctttgtaaaattttaagttacattgtgtgtgcctgtgtgtgtgtgcacgcgcgcgcgcgcgcgtgtggatgcacacgcgctttgacacatgtattggaggacttttggaagtagtttcttctctcctgacgtcctgggggttccagttgggttgtcagacatgacagcaactgcccttgcttgcttaatgcatatttcgagtcaacacgtactcttagaatcacctgaaattattgaatgaaactaggaatgacaggcaatgactgtcatctcatttgagaagcttagggaggagaaggattgcttcagtttgaggcaagtctaagctgtatttggaaattcctggctcgcatgggctaagagcaaaaccctgtctcaagaaaacaaaagattgaaagaaggaaggtaatacatatataccaaacgtgagtccagtgttgagtgtatgtgtgcatgcctgtgctctctggttggttgtttaaataccaagggttattttgtttgtcttttttttttttgttttttcttgtttttttctagacagggtttctttgtgtagccctggctgtcctggaactcactctgtagatcaatctggtctcaaattcacaaagatccatctgcctctcaggttctgggatcaaaggtgtgtgccgttactgcccagtgaatatcaaggtttttttttttttccctcagagtttttagcaccttgaagacagtgtgtacaggtagaaaccaatgactgtattaacagcacgtgtgctctagggggagctctgttcagccttgtctgtgcagctgttagagatgtggcataatgacccttaaatacattcacaacctgccaatttctgcttaagcttatgagtcctcagaggctgacaaatctgagacacaaaatagtccattttagatttcaaatatcaatatttaaaaaatgtaatgtagactgtaggtagtttagaggtctataaaattacccatctattctttctttcttttttttctttcaatttttattaggtattttcttcatttacatttcaaatgctatcccaaaagtcccccataccctcccccacccactcccctacccacccattcccacttcttggccctggctttcccctgtactgtgtcatataaagtttgcaataccaagggacctctcttcccagtgatggccaattaggccatcttttgatacatatgcgactagagacacgagctcccgggggttactggttagttcatattgttgttccacctatagggttgcagacccctttagctccttgggtactttctctagctcctccatcgggggccctgtgttccatccaatagctgactgtgagcatccacttctgtatttgccaggcactggtgtagcctcataagagacagctatatcagggtcctttcagcaaaatcttgctggcttatgcaatagtgtctgcgtttggtagctgattatgggatggatccccaggtgccatctagtctttcttgcttgtgaacttttgttgttgcctagtgtagactaggtactgtgtaatgttttgtggaggatgaagtaatgtcttctctttggccaagacagaaaaaatcagaaccagttgttatgtagctctgcttctttgttcaggtgtgctgctaacctgaagctatggtcttatcatatggtgatcataccatatgatctcattgtataatattttttaccttctagtttttttttttttaagatttatttatttattatatgtaagtacactgtagctgtcttcagacactccagaagagggagtcagatcttgttacggatggttgtgagccaccatgtggttgctgggatttgaactctggaccatcggaagagcagtcgggtgctctaacccactgagccatctcaccagccctaccttctagtttttaaagtatatatatttatacttttatgtgtgtggatgggtgttttgcttgtgtgtatgtatgtcagtgcaccacctatgtgcctggtgcctctggaggacaaaagaatgcattgggttccctggaactggagttacaaatggttgtgagttgccatgctgttggtgctgagaaccgagtctggggcctgtggaagagctgcccgtgctcttagtcatttctccaaaccctgatttttttttttaagactgaaataaagttgtctggacatgatgaaggactccataaaaatcatgttcccatgtatgaaaataatacatatttatttgctcaagtacattggaacagttaaggatgtaaataatgctgaaacttaaactcaagagactttaattctattgaactgagctggagagatggctcagtggttaagagtactgattgctcttccagaggtcctgaattcaattcccagcaaccacatggtggctcacagccatctgtaatgggatttggtgccctcttctggtgtctctgaagacagttacagtgcacccataaatacaataaacaaatctttaaaaaattctattgagctgttgtaattgttcttagcagcttctattagaactgtaagaagttagtttggtacctagtatgccattgttcataagcaccaagagctagaaaggcctgactgacaccagtaactaccatacatgtaaactatgggatgaatgtatggatgtgagtattatcttgccccagaagggaatgaagccccaacccatagatgaaccttcaaaacatcatgctgaataaaagagctgggtataaagggagaatattatataattctatgtatatgacatatctagaataggcattcttagtcaggaaatagattaatagatttccaagtgttggggaaagaccctaggaaaggtgtgcacctccaggttgtcaggcaaaggcctttactctttacccttttattgccttacgtttttttttttttttttttttttgatgcaggatttctctgtgtatccctggctatcctggaattcactctgtagaccaggctggccttgaactcagaaatctgtctgcctcccaagtactgggattaaaggcgtgagccaccactgtgccccccccccccccataaaagtaaagtgtgtatcctttcagggcttgagactagttcataatttttcttctgactgaggctaaaatttttcattctcttgtttatattgtttattggttatttttttcattggttgagaaaatacccaactaaagcaacttaaggaagagtttatttcggtcacatttcatatagagtcatagtgctcaagtgctcaagcttgcctagcttgctttttacccagttcaagaccttagccatggagttctgtccctctccgagacagtgttttcaaggcgtgttcagaggctggcctaatcatggatagttcctcacaggtcatcacagatctcctgggtgattccagattctgtcaggttggtgtaaccatcacacatatcataaaattctacaattaattgcttaagtactttgttctaatttattctcttccctttattgccattcttgactgtgattgactataacaatctgctgctttcctgggtaactgttccatcgtgtgcagtttctgagtgaacctaagtatgtgtgtgtgtgtgtgtgattgattcatctagatagtagtattacagttatattaatatatattctttgagcagtaatatattcaaaaatactcatttattttatgtaagatatgtaatatctcagagccacgggtggtagtgcattcctatcgtcctgtactctggaaaggaggtgggtggatcatgaattgcaggtcagcctgggatatatgagattctgtcccaaacagaggaatcaaaacaaagcaaaaatcacaaataacaacagtattatgcttatgggcatatatgttatatataactatatctttgtaggtcttttgatgataatggactgaaccactgaatctgtaagctagctcaaattaaatattgttcttaagagttgccttggttatgttgtctgttcagagacgaaaaaccctaactaagacaagtggtttttctagtttcaggaaatggtatcgccagttgctcaagtcagggcagattttatctttgaattgtcctcctcctgtgttctagataggtttcatcagaaagtcattttgcaatagtgtcttacttacatctgtgtttatctctgttgtgccctcagaagcctaaatcatactgctcttcacttagatttaatagtcacctgttagtctctctattgtctgaccttccctccctacaaatataccttttatattgattactctcataaagcaaattaagatcatggtgtccccatgtttaaactttagtggtttccagttaaactctagatagatctcaaattcctttttactatcatcttcatgatttgatctgacattttcagtttcctcctacatccctttaagctagttctttcatttctagttacattttatctattatgtaatgtgtgtgcacataggcttttgtgtattatggcgggtgtttaaagtttagaggacaacacacagctgtctgttttctcctagcgtgagtcccagagattgaactaggtcgtcaggtcaggcttggcaagtgcctttatccattgaaccatattaccattcctcattttaaagtggtacttcacactagatcctatataaaatttcttcagctctttcaggaggctcaaatataaaactgtaaaggattgtgccttttcagataaatgttatttatgtggagagaaggtgaaaaaattggtcatatgcctctctagaaattgagtcagttcagtaaggcataatctgtgaattcagctgcatttcggtgttctgcaaactctgtgcttgattgttttcctagtatttttacatggtcttggtcatagtatccctttacaacagtagaaaagtaacaaatagacggtggtaccaggtactggggtacttatgaggttggcccgaccacactgcttataagaggaaagtggactttgggcaagataagtggttgaatgctgtagtgaggcctcgtgggccatcctagtaggagcttgggaaacagtagtactaagagcagcatggactgtggaggcccagcttgaggggaacagtattagcaactgtgttagagaccagtttttgatattttgccaagaatatggttgttttctgcccttgtccagaaaagtctgctggagaggttgcctaatttacattataacattagcataattacagttaggaagtagcaatgaaaataattttatagttgtggatcactgcatgaacggcagggctgtaacattaggcaggttgagaaccaccattttagactaatatcatttgcagaggagattttcaagacaacctagtattgactacgtcatatagttatcagtaatcttatgcagatctacagtgaaaaagagcaagccgggcaaaatacaaaaatgtccagtttgagtatcgaaagagcaccagtcaagtcttaaatgctgaaaaagatataaggggagtggtgtcctcagggtgattaggataatcctgcaacttgtgaaaagaatgaggtttaaggaaagatttgttcctaaagaggagcaacaaaggaaagtttatgcaaatttaacttaaaaagaggccagattcgcgaccaagcaggaggaagaacctggcaggctggacccagttctgaattggttttgaagcacacaggagtaaaggggaatcatcccacagttaagccagggcagtccttgcctggagccgggcaagaccggcttgtgaagctgtgaaagtgagggctggattgtgttgagtccttgtgaatattgaggttgcagagctttgggatgtctgccagggagagctgcaggaaggaagtgggaccgtcccaacagaaaagtgtgtggcagtcagcagatcccaagagccggctaagcctgtgacatcagatagggacttacaggaggtggagtttaccctgctgctcttcagtcttgctgtggtccagtatttgctcattatgtcccttttcatcccctttggaataataatgtatattctgtgtatgttggaagtatgtaatttgctttttgagtttacagggggttacgttaagagattgctttgagtctcagacaatactcttcttgtttgtttgttttttgacttttaaacagtgttgagactgtgaaagaactatgggatattagaaattagattaaatgcattttgcactgtgtatgtctacaagtccatggggccagggagtggaatatggtggtttgaatgagactagcccctatcggatcatatatttgaatgcctggtccctagctggtagaactgttttgaggaggtttcttaggatttctattgctgtgcagagacaccatgttcaaggcaactcttataatggagagtatctagttggggacttgtttagagtttcagaggcttagtccattatcattaagacagggaacatagtaagtagcatgtaggcagtcatggtgatggagaagtagctgagagctttatatcttggtcctcaagctgcaggtagagagagactgggactggaataggcttttcaaagctaaaagcccacccccattgacgcactttgtccaacaaaggcaccctataataaagacacatttccaaaaccatcccagtagttgaccatctgggaatgaagcactcaaatgtctgttcctcttttttctctctccctctctgttcccccttccctccctttcctacccctcctctttcccttttcctttattctcctctcttcttctctttccccccccttcccttcctgctttggatctgatgcaagctctcagctgctgttccagtgccatgcctgcctatctgttaactgtatcaccatggtggtgatgggctcaccctctgatattgtaagcaagccctgattaaatgctttcttttataacttggcttggtcatagtgtctcttcatagcagtagaacagtgactaaataagacaactggataactcaaatgtgctatataagcaaaggggttttattcatccataaagaagaatgcagtcatgttgtcttcaggaaagtggttggaacctggaagtcatcatgttaagtaacagaggacatcattaaatagatgttggcatgtatcttagtagtctaccatctgggaatcaagctctcaaatacacaagtctctctctttctcccctcttcctctctcccagcctcttcctccaaacaaacaggcatggtggcataggcctttaattgcagcatttgggaggcagagacaggtacatctctgtgatttggagccagcctggtctatatagttccaagacacctagagctacatagaatgactatcttaaaacaaacaaaaaaccaaccccccccccaaagttggaaggaggaactttggagaaaggatatacttgaaggctggagagagaggtggctcagcagttaagagcacttgttactcctgtagatgatctgggtttagttctcagcacctatgtagtgggtcacagttatgttactccagatctaggggatctgacacccactttttctgacctctgggcacaaggcacacatgagatgtgtatacattgcaggcaaaacactcacatataaaattaaatgttaaaaaaattgtgaaaggtcttaaagggggtagctacgatcattctacacatacatgtatgttgttacaataaacccgtctgtacaattaatctttgctagttaaaaacagttgtattatacagcttcctttcagagattacatactagggaacaggaaagggaggaaagaaaagctgaaagtttcaaagcaagttgacaaaaaattaggacaatcataacatgaaaagtaattttatgatgtgaaattataacgtctaagagcaaagctaaaaataccctagtttcgcgtatggtctagttatgcatgtctgtaattccaacacttagaaagcagaggcaggaggattacatgtttcaggctataatggggtacatagtgaggcactgaccatgttaggatttctattgttaagataaagcattatgactaaaactaaaacaaacgaaaaataagttggggagtaaagggtttatttggtttacacttccatatcactgttcactatcagaggaggtcagggtgtgacctcaaactgagcagggacctggaggcaggggtatagaggtgtatagagtgtatagaggggtcgaggggtgctgcttactggctcagtctgctttcttgtaggacccaggacatgagccaggggtggcacgacacacaatggattgggccctcctcatcaattattagttaagaaaatgccttatagtcagatcttacagaggcattttctcaattgaggtttcctcctttcaggtaactctagtttgtgtgtcatgtcagtacactgacaaaaacaaatgccaaacaagctcaacagtaaagtgcctgcaactcgtgtgtaaggatcagagttcagatcccagtgtcatcccagaatgattgtggtggcatgcacctgtaactccagcatggggtaggacagggtgggtgggaaggaaggtgcttccctggagcttgctgacttggcagtgtgaacactaggtgagctctgggttcagggatagaccctgcctcagacaagatggagagagataggaaaacccaacagcaacctctggtcccagtgtacatacacacacctgtccttaatgcagacagtatgtcctacacacacacacagacacacacacacagtctaaaatacaggaaagcagtatcttaaaatcttgagagtaggagagcagtgtttggtggtgtttgtcttttggtggtttgttttactcatgtttattattttttatgttggtttttttagtttttaaaattaaaatataattactttgttcaccctttgttttcctctctttgatccttcatatgtactccccctgctctcatatttatgacctctatcctctatttctctctctctctctctctctctctctctctctctctctgtgtttgtgtgtgtttctagatacataaacacaacctgctcagtctgtacagttacctgtaatatatgacttcagggctgacctctgtactacagccccaactgatagaacttagctcctgtacctaagactcaaggatcatagtggaagaaagcagaaagactgtaagaaccaggtgattagagaatttgctgtcacattttatttcctagaaatgtaagagtagacatgatgaaacacatgaggtctcatcaacatgattccctaaagacctcaacaaggatgacatcaaaagatatgctaatatgaaagatggaaattttatggggccttagccctaaaggtagaactacaggcaactcataagtcacaggaagtccctgaaactgaccagattcaaatggtctgtctgtttctcctcctttcccccaaggttatataaacagtaagaactgctgaggagaacagactagcctgctgcctggaagagactcagacctgcctgaaggagagattctctgtcctgttgagctctccacaagtagtgtaatgaactccagggttcctgctcttggtgatgtagctatatttgagttgaccctgcccctgcccttgcccttttacttatattcttgtgaataactctaataaactcattggattaccagattggactttggtggtattattactttggtcctgtcattggttccctcttaagtagatgtttgtattgagtctcaaataaaaatagtgtacacctccctaatcatttacctaaaacatttcaaatgttatcccctttcctggttttccctccaaaatgcccctatcccttcccccctccccctgctcaccaacccacccactcctgcttcctggcctggcattcccttacactggggcatcgagccttctcaggaccaagggcctctccttccattgatgtcccaaaaggccatcctctgctacatatgcagctagagccatgagtcccaccacatgttttctttggttggtagtttagtccctgggagctctgggggtacttgttagttcatattgttcctcctatgggagtgcaaacccccttgggtactttctctagttcttcattgaggaccctgtgctcagtccaacagatgtctgtgagcatctacttcagtatttgtcaggcactggcagcgcctcacaggagacagctatatcagtctcctgtcagcaagctcttgttggcttccacaatagtgtctgggtttggtggttgtatatgggatagatccccaggtggggcagtgtctggatggtcattccttcagtctctgctccacactttgtctctgtaactcctaatcagtggtttttcaaccttcctgacgctgcaaccctttaacacctcacgttgtggtgaccccctaaccataaaattatcttcattgctacttcataactgtcattttgctgctgttatgaattgtaaatatctgtgttttctaatgttcttaggggacccctgtaaaaaggtcagtcaaccttcaaggggcttgtgacctacaagttgagaactgctgactcagcgacttttagtatgtttattcatacatgcaactattgtcatagtcaattttaaaacagtcctgtcacctcagagagctgacactgttatagattagcatttgctgctctgctcctccactcttgtcagttctccctcagcagtctcttctggctgcacgcatccctatagtggacatttcattcaagtggagccatactgttcaggctggattccacttcttccatttagtgcactgtttcagggttaatccatgctcttgaatccatttgtgtttcattcttttaatggctgtgaactaattttccacatttaacttaattaggaattgtttgccactgacctaagagctcttatccccttctttactgaatattttagcctgtttcaataattggtcttactgaaaatagaaataattacaacagaatcttgtttttttaagaacttcttttaatatacataaaagacaagatttgtgatttcaagaaagcagcttacttaagcaaaaggcttcttggcattttttagcataataaaatattttagtgagagtgatgcaatcatgtagtcgacttttgtatttgcattctggctctgggttagacattagtaagtttttcttatgttttaaaatttaaaaaaaatttaaaaagatttctttatgtgtgtaggtgttttgcttccatttatgtctgtgcaccacatggcgacccaaggaggccagaaaaaggtgttagttccttggagctagagttacagacagttatgagcctccatgtgtttgctaggggttgaccctgaatcctctggaagagcagccagagcttttaactgctgaacgatctctccagcccaagcttttcctatcttagtttgggttttattgctttgaagagacaccatgaccaaggcagctcttaaaaaggaaaacatttaattggggatggcttacaatttcacagttccagtccattatcatcgtggcaggaagcatgacagcatgcagacagacatggtattggagaaggagcttagagttctaagtcttgatctgaaagcagccaggaggaggctagattccatagtgggtggagcttgagcattggagacctcaaagcccgcctccccagtgacacacttccttcagcaaggctacacctcctaatagtaccactcccatgggccaagaatttgaacatatgagtctatgtgaccattcctgttaaaagcaccacactatcttaatgagtctgagattctaattcctgggttttttagtatgtggttcttgtacctatcataccttcaggcaagtaaaaaagattttctcctttaatgtatttgaatttgctgtctccttaaatcaagttccgtattagcctttacctgaaaacttagttttctggttttgctttaagcattgttaatattttaatttactaacagcataatgccgttccagttactagagttgtatgacaaatcactgtcatactcagtgactagatataatcattgaggtgtgagggcatctcctgtgagtcagggatttagacagaacactgaggagactggctggccttgtagtctgggctttctgcccgggatggtttgaagtgtgttcacgtgcatggttgggagttaatgctggcgcctcagctgggctttagccagagtatcttccttggactaattcaaatcattaaatttctgtaccctctcactcccaaagctggggatggaaggaggcctcacatatgctgggcacacactgtactcctgaacttcatcctggccccgtttggacatctaccatctacaactgcaagacaaaagactttttgtggtactttgttatggcagtccgtgaaaactaatacaggccacctgtagaaaacacaggctacaaatgcatagttaaaactggtagcttcccctttcactgtatgtggtaatgattcacgcttatttttcacatttctgatttttttatttgtgtctttgttttcaaaggcattttgctatgtatgtagctcaagctttgaacttgaaatctttatattttagcctcctgagtgctggggttacaggtaccaccacacctgccttacatccttcttcatacagcaggagaggctggccacatatcatccatgacccaggtttatatgttaacatttttttggtgaatgaatacaatactttaaaaattgttaagtgtgatagctatataggatattagaagttcattcattacaatgtgttacttaataatcataataaattatctagaagataacaagtgcctcctattcaggtaatttgtttttatattaagaggatctatggaaagtacaaatagtttctctgtagctttctctgcattttcccccctttcagtgttgggggttgaactcagaacctcagacacactgggcaagcactaaatcactgaactgtgtctgcccagccttactaaatatactttctaattacattatttatattttaaaagggtgcgtatatatgacaagtgtgagtgttggtgtgagaatgaatggtatatgtgtggaagtctaaaaatagtgtgcaggagttatttctctgcttccaccttgttgaggcagggtctttcttgtttctgccattctgtttaatgggtgtataaagggtggcccgacgggagcttcagctgtattcctgtccgcaaatcttgcgttaggaaggttgggattacagattcaagccactgtatttggctttttgttgatcaagctcaggtagtcaggaatacacagtgaatgctttggcttgttgagcaatctcacctaagtagaccttgtttagatgacaatattgatgctttctggatatttttatttcttaaataatagctaatgtaacaggcaagggggcatatgggacacacagctttgtgggtcttaaattagggacaataccaaggagcaaagaaaaagccctcatttgtagttttactgtacttacattcaaaatattgaatagagccagaggtatcttagagatggagagaaaagccataggggtacaaatagctctcagacaagtgctgtttagaaataacagcctttcccagaataagcttttcagaaaaagatgtaaaaaggacttctgattaggcaggttgtaaagtataacatgcttttatcttctacttgtctttatttacttaattgaaaaactcatttatatggagagatggctcagtgctgtagagcactggctgttttaacagatgacccaggtttggttccagcacctacatgtagctaataacagtctgtaactccagttccaggaaatagatgctcttttctggcctcctttgggaaccagacatgcacatggtgtacagacatacatgcagtaaaagcacctatatatttaaaataaataaaaatatttaaaattttattggcttgatatgactttaatttcagtaaaatagttattggaaaaactcttctgttcagaagggaacatatccttttgtatttctaagaatggaaagtgcccccaataccgaaatagaaccagaaactaccagatgttttcatacctgccctcctctgtatatatggatgtaaattttttttttttgaggcatgagatctcatatagccttaggctggcctcaaatttggaatcttcctgcctcaactttcagagtgccgggattacaggtatgtgccaccatgcctgggcctgccttacttttttatttgccttttgtgctttgctgataaatcaaaagaattagctacatgaatttcagctaaaacagacttgagaggaagtttccaggaataaagacagtccttatataacaaggtacagtcattcgtttcttcatgatgacttcggtcagaaccggagatgttaccttccatgtgtctgctgctgagcacaatggcagcgggtaatggatgagtgaagacaacagaagaaacgcgttcctcagcttacgaggacagacctacgcgtaggagatgctcttttacttgtgcccacagaccagagtagagtacagttagaaaccagtagctctatcactgcataacttgtgttgtaaagttagaaaaatagttgggaaatataaaattctggacactaaaccttatcctagaatgatgggggatagagagatttcaagagaaaataaaaatgaaaaaaaaaaaaaaaaaaaaagcagtgaaagcaggttaagaggctaacgtgaaatgctggagatgtgtgtcagatagtgcagggaattacaggctgtacagtgtaagactaaagcctgcagaagataagatacattataaaattgaatgtaaagatgtgaaaaagtcaaactagaagcaagtttaggatttcctttcttttgagccggtttcgtgtagctgaggctggaatcttgggatgaactcaggtcaccaggttgcatggtaagcacctttacctggtggcaaacctggagcagctgtccttagatcctgcatatgtaagcacctttacctggtggtaaacctggagcagctgtccttagatcctgcatatgggagccagattttgaacatgggcagtgtcgtggacactgtgcctctttggatgcagggtgtgcagcttgtccaacctgtccctcaaaggcagcctcactgacagtgttattaactccatgttggcctccctggctgggttcattctgacccatctcactagcaacctgacagatcacattgcaagtgacacattgagaaactgctggaagttctctaatgtatagacctagttttttgtttgtttgtttttgtttttgatttattttatgtatgtgagtaccttgttgctctcttaacacacatcagaagagggcatttgatcccattacagatggtcatgagccactgtgtggttgctgggaattgaactcaggatctctggaagagcagcaagtgctcttacctgctaagccatctctccagctctagacctagttcttctaagtaaatactctgccccatgattctttccttgggtcccatatttcatctttcttgctttttttagggactttctcctcagtaaccagggccatctggcattttctgtaatgttatttcagaaggaaagacattctagcagggagggattctgaaaagcaggagttagcctggggtaaaatccttgccccattggtacttgcagctgagtctttgttatcttacatgctccactgctttgtggaatgaatggcttaacatgtcttagaatatttttccacactattcttttcctgcacagaattttcacactagggtgaagtataggatgtggggagagaccactactttacagccttggacaatccatggtgagagtactgtctactgtcagaagttggagcagatttttgtacgtgcattggtgttttaatgtctgtgcatgaattactatacctaaacttaagggtggctggcatgttaattcagaagatagtttatagtgctttttcccctatcacataagatttgagtgagatcttaaggtcatagaagtattgcatggcttgtagtctttatatagagagagttttgtttttgttttttaattattgtaaatatacatgtgcgtgtgtttacactcatgcatgtgtgccatggtgtgtgacagaggacaactttgtggagcgtgttctctccttccatctttcatgtgagttctagagatccagctcaggttctaggcatccgtgagcatgtttgctggctgagccctcttgttagtccacaaggtctttttaaagaaacaaggtttatccgtgtgtggaacctcagcactcaggcagcagtggcaggtgaatgtctgtgagcttgagcacatcctgatctacgtagtgagttccaggacagccaaggcaatggaaagacgaaacaaaaatgaaacaacagcaaaatgtacttattttatgtatgtgtgtgcctgggtatatgtatgtgcaccacatgcatgcaggtgcctgtggaggccacacaggttattggatattctagatgagtggttctgaactttcctaatgctgtgttctttatgttgtggtgatgcccagttataaaattattttgttgctacttcattaacacacaaacacacaatttcaacttcattttgctactgttatgaatcataatgtaaatatctgtgtttctgatggccttggtgagacctgtgaaagaacaggaagccaagcactatatagatttttaaggtatatgctagtgaaatataaattttgtaagactatgtcctcttttgatattttggagacaaggtctcacttagtagccttgatgctcctggaaccaggagtataggtcaggctggtcttgaattcagagacctgccttccttctgcctcctgagtgctagaattaaaagtgtgtgctgtgcgttcaggctgggcttcactgtatagcttggaaaacactgtctggtttgttgatgttggaagcacatagtagagataaacagctcccagcctggagaggtggctgtgagttaagagcatttgctgtttctctgggaacctgagcttggttcctagcatttgcatggcatcacacagctgtgtaaaactctggtttcagcatctgacactgtcttctggcttctgaggacaattggcatgggtatggtgtatatacatacatgtaggcaaacataaaataaaaacaaatagatctaaaaaaattagtttcaaagtctgaatgttagaataatagctaaaccaggtttaatccccatcacctcagtgatttttaagtacaacttagcaggatcaccaagtttgtggtaatgactgaaataaaactaaaatatgctttttgttcttgcccttaggtggcgacagacaaggtggcagaaaagctgagttctactctctcatgggtgaagaacacagtatcgcatacagtcagtcagatggccagtcaggtggcaagtccatctgcctcactacacactacatcctcatctaccacactgtcaacaccaacacagtcaccatcttccccatcaaagttgagtccagacgacttagaactcctggctaagctggaggaacaaaacaggtgagtgcaattgctggacatttctcttgattatcatacaaaccaaacgtccgcctaagaatgcttgtttccttgtttctggggtgttgtttatcagaattatgtaacatacagcttcatgcattgcctgaggacatttgtttaagactaagatatgctttagctaatagcactccccattcctttcttagcatttttgactctaaatccttcatgaattttatgaattattagggcaaaactaatttttaaaagtgttttagagctgaggagtgaaccccgaggccgtgcatgctaggcgggcgctcccttactgacctgtgttctcagtcccccttcttattgtaaactttctaagtagtttcctttggttaaaatataaaataattcagtcaagtctaggtatctgattttattttagagtgagaaatcctatagaagccaaagtgtcccattcccataagagcaagacaggaattatttccttagttaggaatcctggttctgttttctttgaactcattagagatgagtgttggtgcagtcctacgatctgagcactcaacaaggcagagccaaactctgagcttgaggccagcttggtctatatagtgagttccaggagtctctggaccatcatcttcaacagaaagtagggaacagcagctctttgtgcctggtcacggtacagtgctatagctctaagggtaaaggataagttttttttttgtttttgcttttgttttttttttgtttgtttttttttttttttgagacagggtttctctgtatagccctggctgtcctggaactcactctgtagaccaggctggcctcaaactcagaaatctgcctgcctctgcctcccgagtgctggcattaaagtgcaccaccactgccctgcattgtttggttttcttgagacagagtttttctctgtagaaactgtctgctgtttctgcctgtcctggaactcagtctatagaccaggctatagactttgaactcatagagatccagctgcctctgtctcctaagtagtgggatcaaaggtgtgcgccactaccacctggccgacaattggtcctgacatatcttctttgattattaaagttcgtgttcatgttcatggctagggtcatggaaattccaaatgtgttgtcaatgcagatgtcactgttgtggggtagaggctgagaagtgtctaagcaaaccaaagtagagttaagacaagatgtggttaccttcatcactttagttgtgatcaaacatttgggtctcctgtagcccaggctgagggagatcttgaacttcctgttctcctgccttttatctggtgagtgctggtgctacaggcggtgcaccacacacagtttatgtggtgctggagattgaatcaagagcattgtgtgctaggcaagcactctaccaactgagctacagccctagaccatgatcatggctttgaattttagccattctggtaggtattgatactacatggttttattttgctttactttcactttatttatttatttattttttggtcttttgagataggatcttttgtttgacctgaaactcactgtgtagctgaggaggatgctgctatctcccaagttctggggttacaggcatgtgccaccatgtctggcaataatgcattaaaaaaaaaaaaaagaatgatttactttttaaaaaaataaatctttttaattaattaatttatttatttattatatgcaagtacactgtagctgtcttcagacactccagaagaagaagtcagagccaccatgtggtttctgggaattgaactcaggacctgtggaagagcagttagtgctctttactgagccatgtatccagtccccaagaattattgacttttaagtatatgagtgtttgcaggcatacatgtctgaccatcatgggtgcctagtagctgcagaagtcagaagagggtgctggattccctagagctggacttacaggtggttatgagttgtcacgtgggtgctgggaacctgggtcctctgtaagaacagcgagtgctgttaacttctgagccatctctctagccccagtagtgcatgtggactcatttgtttttctactgatgttcatgtattcttattacatgtttgcttgttgtctgcacatatcttttgctgttgctttttagaggcagggtttcaatagatagctttggctgacttggaactcacagtatagaccaggctggccttgaactcagacatccacctgctgctgctttaccagggctaagagtgaaggcaggtacaactatgcctggattatctttgattttacaaatttatgttgtttgctttagtgtatctgagaattctttttttttttaattatttttatttgatcttgtgggtataggtgttttgcctgcatatatacatatcatatatgcatgcctggtgcccatggaggccagaagaaggcattggatcccctggaacttgagttagagatagttaagagccattgtgtagatcctggtaaccaaaatcagcttctctggaagagtagttggtgctcttaactgctgagtcatctctccagccactgttttgagaattctttaagatgcaaatttgttctcaggaggttgattttcatatcttccttttccattggcgtttgtcattctcctaaaatatcttttgaggaatagaagttgtgtatgtgtgtgcatgtgtgtacaaatggatgtgggtgtgtgttcaacatggatgtaagtgcatgtgtgaaggtagaggccagagatttatgctgaatgtcttctctgttgctttccactgtgctttttgggtcagtgtctccttgaacctgaagctcattgattatctggctagcaagttccagggacctgcctgtcagtgttctccctctcacaccctccactggggttacaggcagtggctccatgcccagcttttccgtggggcagatgatccaaacacagatgtgacctcatcgtgtttgcacaggaagtgccttattgactgagccacctccttcagcacctagattctacagcacctacagttctgatgaagtaccagcttaaagattgacctccagggactgtgcattcagtgaccatagatcatacaaaatatcttctatatattcttatagttttactttattgatgttaaaagagatggcacctcactggattgctagctgccccccatacttctggattcaagtgatttttattaaatttgcttgtatgtgatacaagatcagagttttgagaagctttttaagatttttattttatgtatatgggtgttttgcctacatgtatgtgtgtgtgtataatatatatatatatatatatatatatatatatatatatatatatataatcagtccagcacatatatgcctgatgctcactgaggccaaaagagggccttggccctcctgaacctggagatagacagttgtgtgcctatttgattgttttatggcatctgttaaaataactattattttgagacagggtctctctgctgtatatatagctctggctgttctggaactcctgtgtggtccagactggcttccaagtccagagatctgcctgcctctgtctccccagtgctggaatgaagatcgtgtaccatactcagttcctttatttgcttgaatttttttttttttaattaattggatactttagttagacctcagttgttcatagatttttcagtctgtttctgcactcagtctcaatctgttcatgtgtattgattattggtcataaggtggactgttttgcctttcattatagctttgtaataggtttggaaatcagatattctcatgtggtactttgagaatggttctgtaggctcaggaatttcagtgtttggcctctggtggagctgttttggtggaaaagatttggagatgtgaccttgttggaggtgtgtcactgtgggtgaccttgagttttcaaaagcccatgtcaggcctagcagaaagatacatttaactttattaaaaacaacaaaaatccaaataaaaatttgaacttgaagagctagctttcttcctctcctttaccctgccatcctctcgtttctctgaccactggtaaggaagtcgtgtagtttacaggtaaaaagtgcttggcagaattactacaccagcatatattccatggagactccgctcctgatatctggtaactgatttaagtggtagaaaagtgtgagtaggtatgggggacttttgggataacattggaaatgtaaatgaggaaactacctaattaaaaaaaaaaagaaaagtgtgagcaatgttgcaggaaattaagatgtaagacacatgagaacagagaatcattttcatttacatggtttcattgcagctatttctttaaaaaaaaaagtatatgtggcagccccagaaaaatgtgaagaaatagtttagtgcaatttcagagatttgtttgaagaaagttaataattgatagagaaagttgaaataagacagatctttatggtttgtgttaatgtgcttttctttttcttactaaaaatacaaaggcattggcagagatgaatttaaggaggtaagcgtcaagtatggacattttattttacttcagtgggggaaatgttactgtttgaaggtgtgaactacctatctatctgtggggtttaaattttggcattgctcctattgcttagcacttttcagtgtgtcactcagggagacacaacaatgatgaaacagccatttatattacatatgtttttaaaatgtaattactatgaatctttgataccctagtctaaatgtctatgtaagatctgtacagtttagtattttagctgctagtccacagagttgatgggcacttgaaatgtgcctagtctggcttagatatactgtaagtgtaaactatactagattttgaagacttgttttgaaaaaagtcataaatggggacttaggttgagagcaatgactgctcctccagaggtcctgagttcaattcccagtaaccacatggtggcttacaaccatgtaaagttctggcaccttcttctggtgtgcaggcatacatgcaggcagaacattgtacataataaaataaatcttaaagaaaaaagtcataaatcatcaattttaagaaaactgactacatattaaaatgacattagctctgtctgctggttcatgcttgaaatcctagcacttacaaggctgaggaagaagggtcactacaagtcccaggtcagcttggggtacagagagagaccctatctcacaataaacaaagaaacccaaataaaatcaattataaaaattagtcactttttaattttttgaaatgtggctactgcctggaacttttaaagattgtgtaagtggcttgcgtttctgttgtgcagtctgatctagatggtctactgtttattaaatacttgaaaaaaatcttagaaaagcagcattacctcagtttccctaggataccctataaaacatccagcaaaattcactaatgaatgaaaatattacaacagatacttcaactttatgtcaaaaagtatatctttaagaaagatttatttttatttagtgtgtctgtttgtctgaatgtgtgtgtaaacttgtggagtccagaaaaggctggaaagggagttggaatccctagactggagttagttatggttgtgagccagcatgtgtgtgctgagaactgaacctgggtctcttacaagaacagcaagtgcttttaaccagttgtgccatctctgcagcccaatatctctgtgtgtgtgtgtatgtaaattatataaaaatacatttacactctgacacacatattataggaaggcacttcatttgaattggtttcatttttgtgagttttttttttttttttcttccctctctttccaatgaaggcaggattttatttagaatatgagactagctcagattctctcatgtaatctaggctggtctcagcctcagcctcagcctcccaagtgctggggtcacaggcatccactatcatgcctggctgaggattattttttctcagttctttgtataaaggactcttgaacttcttgagcagtcatttaaagaaacagcgcaagtaagactggagagagaatgtcatgttgattctttttgtgttgttttcaatgctaaactcttgtggttttgttatttctattgactagtgaggaatctgtatgtgttgacctgagagcatgtcagtctcatatgtcaggcatggagttttgttgcagtctgaatgtttgtgacagcagaattctgtgttggattctaatttggaacataacaggttgagcctttgggaagctcttttctcatggatgggattaatactgtttaaaaaagagactttaggggtggcctacaggcaaacattctgtatacataatctttttttttaagagactttttttttgtagaacatgattttaagattttcaactgtttatattcaacaaacagtagttattttaagatatacttcgttgttatgtctcctttttcatttctgattttattaatttggatactgtctctgtgccctctggttaatttggctaagagtttatctatcttgttgatttttctcaaagaaccagctcctggtttggttgacttcagaactgattttgattatttcctgcaggctactcctcttgggtgcatttgcttctttttgttctagaactttcaggtgtgctgtcaagctgctggtataagctctctccagtttctttttgtaggcacttagacctatgagttttccttctcctactgctttcattgtgtcccataagttttggtatgacgtgtcttcactttcattaaattctaaaaagctaaaaagagactttttagggagcctatggcagtgtctgttatgtgtgaacacattaatagaagacaccatgagtgagacatgacccctgtcaaatttgaaccttagtgttttgcttttgtacttcccaacttccagagctgagaacagcaaatgcctgttgtttataaattacttaatagttattttgttatagaagacccagatatgtgtcagtctttactttgctaaccatttatttgacaaattattttctttctcccagtgtgttccatagtgtgtttaaatgtaatgttattagagaccttggagccttacgctggaaacactattctctttgtgataagacactgcctttaagtgccagaatagttctccatatggctttctaatacagcgtttttctgccttggttcttataaattatcttagcaatttgcaaattaccagttggcatagttgttgttgtatcttattctgatacccatgggaaaacagtgagctacagctgatattccaagtgtttaatgtcatctcctcacagttgccaaatttctgtattatttacttttttcttctctgaacttttgacttgtgtttccagccgctgttgatacagcctacaggggatgtcttccaagtccatcacagcacagatactaatgcctgacaactgttccttctgttgatgctgttgagtttcatatgtgtgtacctccttctctcccagctctctctcttactcccttctcccagacagtttctcatctactaaggtttcttgcataaggatgcatgtgagcttgtgtacttgagtgaacatggacaactaaccactgaagaaagagactctcctcattaactgtcaaggctcctcaaggaggagtggtctcataagcccctcttacctgtgataggatgttgacagggtgaccacagctgctgcagcattatttccaaaaatgtgtttcccatcaaccccctctctccatcttcctgctttcatagtctttctcttctgtgatgttccctgggcctcaggagcatctctgagagtcctgtttaggccaaacactaaatagtttgttacctgtaacacctgaacagttgtaatgtttttgcattacatgctctttccctctctgtctctctttcatacacacacctgaacatatataatgtttccacatcagagagagggagtagggggcgtggggggtgggtggagagaaagaaactgagggcagcagtattctcttgggcagactggttgctggaggcaggtgtggtgaaggatgggactgtgaagccagagcttttttgtacttttcaattacactgttacagagagggttttgtttttgtttttaatgtttgttgcatgcaggcttccatacatacacaaagtaaatgatctctgctctcaaaagaaacctaagtcaaagctcagaagaacccaataaaacaaaaatggctactcttgcatatgtcccatgaagccttggaaggtgggtatcttggttctgttcagttctcagagccaaagatacaaagcttatctgttagagataacacttaaactgacccccccccccaattttgtaatattccctgattctccactccttacaggatggtaaactcaactggtgaagagaataattaagttttagaggaacttctcagtggccagatttttatcagtggtgctacaccccattttcccagttgccaggctcaagtctggaagttgttgaccttcaggcagtatgccttctaccactactgcttttgttgaaatcccatggccatcagccatctgttttgggccctaaattattaactacatttaacagtaagaaatgagaatacttgattctatctatatttttataaagtctacatattaagacaattgtaaatgcttttttctgcatgccttatctaaatataatcccgtgtcacttaatgagaggataggtctagaagaggcactgtgttggtttcactatgtgaggatgagtgtttatataaacttgcctgttgcttctcagctgtgaacctgtatatcatgttattattggataaaataatgtaattagttgtaagacagtggtatttgtgtgtctaaacagaaaaggcacacagaaaaatgcagtatcaaagttaacaacggttggtatgcttgtgggtggcatttaccatggattttgcaggccctgagctggtgagtgattggaaggcttggtatgctgcattgctgtacattacagtgagtgtgaaggcccaggacatgatactgccggaagccttgtatatattatgcacattccgtgcagtggtgagaaggctctgggcactgcacttccataggccttatgcacactttatagttgttatatgatttagggtttttttttgtttgtttgttttgtttttgaaacaaagtttatgtatcctggaccagcctagtgctcactatattgaccaagctggccttgaacttgtgctttttctgcctctgcctcccatgtgttacaattaccaatgcctgccacagtgtctggctatgctgtattagagctagcttttcttaatttttttttttttttttttactttttgaggggagaggttattgaaatagtcttattacatagttcaagctggccttgaacttgtgatcttcctgcatgtgcatgtgtgtgtgacagtgtaaagtttcatctgcctatatactgaatatcagtatggctgaagaatggcttggtttttataattatattaggaaaagaatgctgcttctgacaaatacagttgacatttcaaataatgctttattagggtatggatggtgtaagacttgaaaaggctgcatacacagcacaatttaaaattgtgtggctatcctttaagaagtgtgcgaagtagttctgtgggcattttactgtgtgattgtgctctttgtgagtttggtactctttactcactgacgtaatgcttgtttttctttactcactgacgtaatgcttcttttggttatgtatgttcctaggagcatcaggaggttttgataaaataaatgcagcttagttttattaacaaagcaagtttcttaagttttattcctgggaggttggatattctttcatgaaaatgcctttaagcttatgtttctatcttatttaataaaattactcttaaagtatctttttagctataaactggaattgttttctaatttgaaaatgtgaccaatctaaagaaagcatgacaaggctgagggaaacccactagtttccactacacaagtcactaaagtaaaagagcctgttcacacaaaatgtatgtaaatggctgggataattggtttattacacacatgaatcattcttgaatgtacaagctccagaagagcaatagggtcttcatacacaagtttttttcatcaaattaaacttttacccttacatcaaaatggattaagcagttaatataataaaaagagctattagtgatgagtcaactaagaaaccacaaataaaccaaagaatatggagagaaagtgtgaaagaaggaaggttgagtcatcgaggtataaaagattttgggaacaaagccagtcacactttatgggcccatagcgccaatctatttttgttgaccagttagactttaaaatacaaaatgtaggttttggcttaatctgggtgactttaatgtccatttaagttctaggtcttttggaataaaatgagtacagaaacgttcatgttcttcacctagctttttataaattaaaaaaatttaaatttaaatggcttccacttaaaagcaatctcattgtctcttatagattgggggacctttaccccttctgagcagtattgtgtacccaccaccctcacaccttgtggttatccagatttaagtcaataaggaaaacttttaatctcacatccaggttatgcctggagaacgctcgtctgctaggagacagtgttggtacagtatttctggtgcgtgcaacatgcagcggtactgtatcaggtgaagacggtgcaccagggaggatgaggcaggtacagcgtgggcgtgggttcatgggaaacagtccggtgggaatcaaaagaacttctctttcagagttcccctagcttttatttgtagaggatatccagtattctctttagtcacatcgcatatttctgagtccattcccgagctgttctgttgtacttgtctctatctgttttgtagatctgagcaatctcaggcactaagggatcatctggattggggtcacacaacagagaactgatggacaaaagtactttggaaatagttagtgctggagaccactgtgaccgaagaatatcaagacaaatactgccgttactgttaacatttggatgataaattcttgttgtaaattcaaccttaggtggtttgaaggggtactctgttgggaaatcaattgtcaagaaaaatgctccgccctgatagggactatcatttggccccatgattgtagcttgccagtgaaacatatcttccccgacaggacctgctgaacactgtgctgggggatcctgggccaggtcgttcagttccttgtggattctcttcagagccatggtggaaggctgtcttggtaggccccaggtggaaggaggcaggcaccgagggcctggggctgccttgctggttttggatcagccgcagaagaggaggcaggcagttctggcctggccctggcagaatgcgctgagggccgaggcccactcagcttccgggccagccaccgtgggcactgtatctgtcttcacatcggttgtcgcatcaccctgtagccgccttttttgtgctgccgcagtagctgactcttcttctgagaccttagcctctgcggatccctccgccggaccctctgcccagggctcgtgccagtagcggtatcacagaccgacgcagcttgcgcagctcgggagggtgacagttggtcagggatgatgggattggcagcgtagtaggctcttttgtttgtttgtttgtaacatgaccatcatcacgaactcataataggttgtgctatgatgtcttgagggcagctgtcactaggttaccaaatcttagctttggctcactttgaacaaacctctgacgactgcagttcactgggaagagacttgatgtgtcaagtattccacaatgtttcaaatctcagacaaaaggaagtttttttttttttttttttttttggagacagggtttctctgtatagcctggctgtcctggagttcactttgtagaccaggctggcctcgaactcagaaatccgcctgcctctgcctccagagtgctgggattaaaggcgtgcgccaccacccggccctattttttaattttttaagagaattttaatttttgtaattagaacttctgagatgagcattctaaaattttctagaatatacaagacacttgagaaagcagctatatatctcttctttttacaaaggttgctgaaaataacctttcactaagtaattcatatttttaaacacattttggaaagcttacagaaataaaagggagctctccatattcatttctagtcctaattttacactctcttttttactttaggaaacaagtaaaaaaggaaaaacaaagcagaacaaataatagcaaaactaaaaagcacaagaaacacaaatataaaaataaaccccatactaacacaaaattgaatcacataatacacaagcaaatgaccaataacattaaaataaaaaaggcccaaacaaagcagtaagagatcccccctaaaaaaaacccaaaaaacctacaacactgtaaaaccacaattgttagttttgtattgaccatctgctgggcggcctgggccctaccctcaagtgtggtttatatacccagttaggttccagtagagatggcttctaggttaggggtagacctcctgtcccctcacccctctcaggagtgggagcccatctgaccaggactggtaagggctctgtgtttaatgccacagtgtctgagtttttatgtgcatcagtcctgctgtgtctaaaaggccttgtttccctggtgtcgtccatcccctgtggctcttacagtctttctgctgccacctctgcacagctctctgatttctgagtggaggggtttaagtaagacatcccacttaggactgagtgttccattacctctcagtctcggcacattatccggctgtaggtctttgtgttagttcccatctgctgtaaggggaagcctctctaataatggctgagacactgatctgtgtgtatagcagaatgttgttaggagtcttttttgttgctatgttactttagcaggacaatagtgtttggttttctcctaggcccatggcctatctaatctcaggttcttggctacctgagcagtgtcaagcatgggttccatcatgtggagtgggtcttcaatccaatcctaaagtggctggttacccacagtattggtactactattatactagcattctatgcaggcaggtcactatttgtgagaatacatcaactagatgtaactcattcatcttatgattcaaattatggaagtttgatttgatggtgtaagttgtctagttggggctcaccatttagatttcttttgcatatgtatatattttaagtagctcctacaggaataggtttccatatgaccttgcaaatggcccttggtgttaggtgtcccttttcagtattccctccctggttccactcatctctttcctttttaatccttttgttccagttcccccagccccagtccccactgtctctggttttgtgcagggcactagatatagaatgtttgctttcttctatattatatacagccatctggtttgaccagcaccatttgttggagatgctgtcttttcttctgtatgcaagaattgggtatccataggtgtgtggacttatatttgggtcttcaacttgattccattgttcattgtgtatgtttttatcactattagtatattacaactagaactctggaatggtgataccttcaccagtcctttttttattcaggatctctctctctctctctctctctctctctctctctgtttccctgtgaaggtcaaaatttttttttcaatttctgtaaagaattatgttgcaatttcgatggggattgcattgaatctgtagatttgcatttggtaggatggccatcttcactatattaatcctaccgatgaatgaatgttggcgatctcaccatcgcttgatcacttgataatcttttcaatttctttctttaatgttttaaagtttttattttacaaggcttcacttgcttggttagagttactgcatggtaatttgtttacgtattaattttttgaggctgttttaaaaggtactgttttcttgatttcttgctcagtctgttatttgtatacggaaaagcttctgagttttgtgtgttgattttgtatcctgatacttttctgaaagtgattttcagctatagaagtttcctggtggagtttttgttttgcttttttttgttttcttcaagacagggttgttttgtgtagctttggctgtcctagaactagccctgtagaccaggctagccttggtgtgagacaccagcactcagttcttggtggagtttttaggctcatttatatataaattcatatcatctgcaaataaagatactttgatttcctccctccctccctccctccctccctctctcccttccttcctgtttgtatccccttaaccaatctccttcagttgtctaagtgctctagctaagacatatattcatatattgtattttctaaataggtatggggcgagtgggcagtcttgtcttgctcctgatctgagtagaagtgaatgttttgagtttctctttgtttaggctgacattggctgtgggcttgggcttgctgtaatcatctgtgttatgtgaagcgtgtcccttgcatccctagactccaggacttccatcatgaaagggcactgcatttttctcagaggcctttttgcatctgatgagatgatcatgtggtttggtctttcagtctgtttatatgatggcttatatttatccatttacatggaatgaaccatccctgcatctctgggatgaaacctacttgtatcttagttaactgtagcctggtaaaaagaattgggcaatattccttctgtttctatttgtgcaatgatttgagtagtattgggattaactcttctttgaaagtctggtagaattctgtactaaaattatctggtcctgggcttttattggttgggagacttttaatgactgcttctatttcattaggggttataggtctgtttaaattgcttttctgatcttgatttaactatggtaggtagtatgtatctagaaaattattcattccttttaaattttataatttggtggagttcaagttcttgaagtagtctttaaatcctctgtatttccccagtgtctgttaagtccttttttgtctcttattttgttaatttgaatattctctttttcaccttttagttaatttggctaagggtttatcttactgatttttgtcacagaaccaggtcttcccttcatttagtctttatatttatttgtttctgattggataacttctgccctgagtttgcatattgcttgctggggactgttcttggtgttagtgctcctctttgttgtgaaactaagtggtaacatgagatctctccagtttgtttcaggcgggaacttagtgccgtgaacttgcctcctcttagcactgccttgatttcatcccatagttttgtgtatgctgtgttttcattttcatccaattctagaaaagtgtttaatttccttttccatttctgtcttgacccattcttctcagtagtgtgttattcagttggtgtccaactttaattggcagtgttctaataggatgcaggatattatttcagttttcttttatctattgagatttggtttgtatccaattctctgttcagttttggagaccattctgtgtgctgctgagaagaaagtatagtctttggtgtttggggtgaactgttcagtaaatatctgttagggttatgatattgatctctgtttctctccttagtttttatctggatgacctattgacaaaagttgggtattgaaattgtttttagtgtgtcagggtcaatatgtgatttttcctgtagaagttttccttttatgaacttgggtggttttgtggttggtgcatacacgtttagaattacacaatcctagtgggtttttccttttagtatgtgatgttcttccctatctcctttgattaattttgttttgaagtcttattttgtcagatgttgaaatggctctacctgcttacttcttgtatttatttccttggagtatctttttctatcctttttccctgaagaaatgtatatccatgatggtaaggtgtatttcgtggatgcagcagaagaatggactttgttttctaattcattcttttagtctgtgtctttttattgggtgaagttgaggccgttaatcctgagacttatcacaaacaatgttccttttattttgttgatgttttcttccctcttttgattcacttgttttggatgatgtattccgtgtgttttcttcagattaaagttttccctatggcaccttctatagagccgatactgtttaaatttggttactattatggattatttctctttgtccatgtattgtggttgatagttttgctagatatagtaatctggtctggcgtctgtggtctcttagtgcttgtagaatatccatgtaggcctgtctggttttagagaagtcaggcgttctgataggtctgcttttatatgttactcggcctttttcccttgtaacttttactattctgactttgtacttgtacatttagtattttgattatcatgtgttgttgggaacttcttgtctggtccttcctactgtcctgtctatatggttcttggtgatagggacccccttctttaggttagggaaattttccttatgattttgttgaaaatatttttgtgcctttgatttggtggtggtggtcatggttctccttctcctctctctgttctttttcttcctataagttatagattttcataatgtcccatatttcctggatgttttatgcctggatatttttagattcaatgttttctttgactgaggtattctatttcttctgccttgtcttcaaggctttgatgaagctttctctgaagtttttattgggttttctatttgggttttctttatggttctctttgcaccttcaggtcttaaactgttctactcatttccttctactgtttgtgttttcacagacttctttaagaaatttttttcatactcattttagggtccttaactgtattcgtaattgctattttgaaatccttatctcgtagctatgttgcctttcttatggcttactatagtagggtagggttcctgggttcaggtggaggcatattgcctagagtagtaatcattgtggtttttgcactggtgtgtaggcattggggcttaacgtgattgaggtgcctgtagatgctgatttctggtctggtctggtctttgttgagtgagagtttcatcccttggtatctgttaccctctcctggatcataggaaagtgtggctgtgggttgcctggaagggagnnnnnnnnnnnnnnnnnnnntggctgtgggttgcctggaagggagtgcttcttaggttggtggatggcagagagaaatagaggtaagctaggagaacagctgagagcagcttcaagaaagatccgaagggagtttctccacactgaaaggtaggggcagagtcctcaggctgtttaaggtgtagttggaagagagtatcctacaagttggtttcagtaaggcaaataataaagacacataagaatgaaagtttagggagtccctgccagccatggtcactggggttggaggggagcaggtaggaagtgcttttagaagagaggcagagtcctcaggaagttcagcaacagtccctagggcgtgggctggggggtgggggcggcctttggggctgggcctggggagaagagggacctgcaagcttaatgctggaggataggaagtagagtgaaaattgcatacttgtccaggtttgcagtgtccactggacgcactcaaggtagtattgttggttgacccaaaggaatgggtattgactaggaggcaggatttagtggcccccagaaagggggaaagctgggtctgctgtagtgtttggcatccccagggaatggaggtggactacaggttcatttcataatctgacaccagtttctgaaagccatgttagctccatgctggctagcttgggtgagtggagactttagagttagtgtggtttaaattgtgcttctgtgttgtctgaagacattggaccgtctttatgtgattattgcctacttcgttaacatttcaaatgttatcccctttcctcatttcccctctgaaaacccccctattccacccccagtccccactccctactccctaacccacccactcctgcttccctgtcctggcattcccctacactgggttatcgatctttcacaggaccaagggcctctcttcttattgatgtggctggagccatgagtccctccatgtttactctttggttggtggtttattccctaggagctctgggtgtattggttagttcatattgttgttcctcctatggggctgtaaacctcctttcagctgcgtaggagattttttttatgtaagtacactgtagctgtcttcagacacaccagaagagggcggcagacctcattatgggtggttgtgagccaccatgtggttgctgggatttgaactcagaccttcggtagagcagtcggcgctcttaaccactgagccatctcaccagcccacgtagatttctatacttattgctactgactaggaatttgagcctggttttgccagatctttatgtataatgtatagttatacacacacgcacacacacacacacacacacgttgtttagatatataggctatacatgtgtgtggaaaaggaaaaaagagaagggatttggttaatcattactttttagatctagtacatagtaaatatgggatttatggattactgtgtatgttaagtatatattaatattgtttcccccatggagccactcccaccctgacctccctaacttgaatgtaaaacatctaaaaattacacctacttatttatttatttttttgggggcaggtgtggaggtcagaggacaacttgtgggagttgcttctctcctcctaccgtgtgaaccccagggattgcactctggttatcagcaagggcctttacctgttgagtcattttattgatccttgaattgtttttgaaattgttcaggttggttttaaaactcttgggattaagtgaataagtgaatttcctaataggtgagtctgtgctgagattctaagactattggtgtgcaccactgtgctgggctcccttccttgttgtagctctcttgtgtgtggtgttgtggcacacatgtggaggtcagggagaaagatcccaggggagtcagttctcttcttctgttatgtgggcactggggactgagctgaggttgtcagatttggcagcaagcactttaccttttgagccttctcattgacctctttgtggcaatgaatatgaattataatggggctaattgtattaaatgcttaaaatacatcttactggctcaggttttgtttttttgtttgtttgtttggttttttcaagacagggtttcctggctgttctggaatggttcagttttttaactgctatgcatagtgaaaaagtgcaagagttgctgatttcaaccaaacaaaaattgttaaaactgtaacttagagctggcatgatggtgcttacttttaagctattctggaggcagaggcatgtggatctttgtgagtttgaggccagcctggtctacagagtgagttccaggacagccagggctacaactagaatccctgtctcagcaacaacaaaagctaataattgtcgtgaagtttttaaatgctgtccttactttatctagtatcatgtgagatggtatcttaaacacctttaattctgtttagattaatagagacagacagtaagtctttaagatcagtgaatgggtcaagaagaaacagtggttcctctcttgtatcaagttcatcagcctccagcaacctcagccacctggaggaagactcttggattctctggggaagaattgtgaatgaatgggatgatgtacgcaagaagaaagaaaagcaagtgaaggtatttacattgtttacggaagttctttctcttatcccagagggtaagaggcattaggagaaatggaaggattctcctagtaacctgtgtgctgtgtaaggaacaggttgcctttatatgtcttcattgtccatgcttgatagaaagaagtctaggttgtagagattcacagttgaaaaaaaatatttttagaagttaaattctcccattttgtaaattcagaaatgaaatggagacatactgtgttagcattttgcctttttccttcagcagccctttattttttattttttttcttttctttttttttttttccattttttattaggtatttcgctcatttacatttgcaatgctataccaaaagtcccccatagccgcccaccccctctcccctacccacccactccccttttatggccctggcgttcccctgtactggggcatataaagtttgcgtgtccaatgggcctctctttccagtgatggccgactaggccatcttttgatgcatatgcagctagagtcaagagctccggggtactggttagttcataatgttgttccacctatagggttgcagatccctttagcttctttggtactttctctagctccttcattgggggccatgtgatccatccaatagccgactgtgagcatccacttctatgtttgctaggcccaggcatactctgacaagagacagctatatcagggtcctttcagcataatcttgctagtgtattcagcagccctttaaatgtgatggtgcagtagtgtgatgtgtgtagctctggactgtcagggccgtcacgccttgaaaggctatgttttcagagagacaacaatttatcatggctttgtagtccctgatcagaacttacccaaggtcaagttgtaaccctttttaaaaattttcattgttactaaaattttttttaaattataaaattcataaagttttccatttcaatattccccccctaaaactcttggatcacaaggtatgagacatttaaaagttttgttttctttttgtttttaggagcttgttcgtaaagggataccccatcacttcagagcaatagtgtggcaacttttatgtaatgcacagagtatgacaattaaggaccagtattcagaactcctgaaaatgacttcaccttgtgaaaaactgatacgaagggacattgctagaacttatccagaacacaacttttttaaggaaaaagatagccttggacaggaggttttatttaatgtaatgaaggtgagctctatttactaatttaaaaaaaatgaaatgaatttgtaagaggttgaaattacatatttccataatgaagcgtgaattcccatcatgataatcgggtacttgggcaataatttagttttagttccctttctgctttaattctgacgcttcatcaacatgtagtttggagaacttactagaaaatttgtcacattatttaccattggttgacaaaaaataacttactctgactgagcattgcaggttctttatgaggatagatagttcacactgtaacgagatcatgacatatgaaacggtcctagctgttaagtgtgctcggctctttaaaagtgtgctgttgcttcttcaatgttgcctccccacagtttcttttcctcgcatccacctgtgaaacattagttccttagtttgaattttgttgttttacctgactgaacgcactgtttatctctatcataaaaatctgacttttaagctctgtgacctttctgagtacaaattgctttattttctttgtccttaggagctgccactttcttattgggaaattgtcaaaagggattttatgtaataaaccatttgctttttaaatatttatagaataacatctgcaacaagtaagcaagagctttttaataaataaatggacttttaatttagctgtctcaccaattttaggtttttggagaaggaagatagaatatacacgttgaagtattttgaacgtcatgcttttctctttaggcatactccttagtggaccgtgaggttggttactgtcagggcagtgctttcatcgttggattgttgctgatgcaggtgagttaatgcacgtaagtagtaactgtctaagcttttcacgtcaaacggagaatttaaaaaccatctttagggctggtgagatggctcagtgggtaagagcacccgactgctcttccaaaggtctggagttcaaatcccagcaaccacatggtggctcaaaaccatccgtaacgagatctgactccctcttctggagtgtctgaaggcagctacagtgtacttacatataataaataaataaatctttaaaaaaaaaaaaaccatcttcagtttcactgagctacgtttcacagatttgtgttacctccttaaacacaacacacatagtgacttagttttgcactttgaacatatagtaatactgctctgttgctaccaaaagaaatttcagctcctgctctcctgcctccttcctcttcccttcacccacttccatccgtggttgatttctggcatctggacaccagtaccacgtgtgctcagaggaaaaaagaaactgttattgaatgatactttgtttaaatatgattttgttttatttctatgtcatgagattttgatctgtgttgttattttttttaaatagatgccagaagaagaggctttttgtgtatttgttaaattaatgcaagactacagacttcgtgaactatttaagccaagtatggcggaattgggcctttgtatgtaccagtttgaatgtatgatacaggtaaatgtccactccaccttttgtactccctcttggaaacatcattttaacaaaccttatgttgaaaacattgaactaagtgttggagagatcctcagaggttaaaagcaaccctgatgctcttgtagagagcctgcttcaccttacaactgttcgtaagtccttgttctagaggctcagatgccttgttctggtctgtatgggcacgggcacacacagtgcacataggtaaatgtaggcaagatacttaaacacactttaaaaaggggcaaagtaacagttgggaaaaaaggtgttttaataccatgatgacttgctggtcagtttaacacaattagacctacttctaaagaggagctgttgttgacaagctagttatggtctctggctttcttactcagactttaagcattagtgtcacctgtgccataactggcctgtatgctgttgcttctgttctgtgtgcctgccatccctgctgggtggtcggagtctcctggagaaggccagttcactcctcgtggacactgtctgtcggttacatcccttccctccattccccttccatctcattttcccccccatctgttgattttttgcgtgttttataattttatgtaactagcttaagattcaaatggtgtagaagtcacaataaaggtgaaaaggattggaatcaaaatcaagtggaccttttaaattttttgttttttttaagacagggtcttactattaagccttggcttgcctagaacttatgtagaccagactggccttaaactcacatggatctgcctgcttttacctcctgagtgctggacttaaacaccacacctggtgaaaaacacttttgaattttttttcctttctggatttgatttgggccagcatttctgttgatacaagaggcaggtttcttctttttctttttttttggggggggggtattttctttatttacatttcaaatgttatcccctttcccagtttcccccctcctagaaactcccatcccatctccctccccctgtttctatgagggtgttccttacacccacccacccacccacccactcctgcttcctagccaagaggcaggtttcttaagacaggggacagggtttttttgtatagcccaggttgtcatggaactccccgtgtagaccagactgtccttgaattgagagagagagagagagagagagagagacagacagacagacagacagacacacacacacacacacacacacacacacacacacccttctgcttgtgcctctggagtactgggattaaaggtgtgtgcagccaccacctagctaagagtcacctttctctggaattataaaatcctgtgtgttgtataaagaatgagatatgaaagtgtccttacattttttaaaaaattcagaatacatcttgaggtattttcttccttctgaaatagtaattttgtttgttgatacaaaccttaaactcttggtgctgagtgttaagatatcattgaaggtcttgctatttttctttactctgtaggaggtaaagatgaatgactgatggtatatatagtactcgaaagttcagcatagcttttcttttctttaaacattttatagaacgattaaaattaattaaaacgaatagaagatatcagacaactgcaattaccaagaagacgaagaggaataaacattttatgactgttgttcaacacactgtttatagccggatggatatttgactatggtttagttttccttgtcagtgaatcagtgtaaagatacagctgaagttcggtttcctgtcatttctttgcccttcctagattgtagctgttaacttagtgtcagtgtttatacttgaggttttctgtaattctagatgtaatttgatgtaggcttacctggggataatctagcttgaaacactcaattttattgtgttttaactatttttttctcttttctaggagtatcttccggaactctttgtacattttcaatctcagagttttcatacgtcaatgtatgcatcatcctggttcctgacaatctttcttacaactttcccactaccaattgcgacaaggatatttgacatctttatgtctgaggtaagctcacgtgaacagactaggagtcatggtttaattgcagcagagtaaaggagtcatggtttaattggagcaggacagtgtaggatgagtgtagggagagagagagcctttgtgtttccactgtactctttccacaggtatctcatttaagcctcctcacagccttactgggtaggttctgatactatccccgtctgttagatgatggatgaggaagctgagacttacaggacaattgagtggcctgactggagacattaccagcacttggggctgtatccaggattcagatatatacagttgagttttggacctgctctctaaagtcatccgtttttatcacctttgaatgatagagagagtaaatgaaaagtaaattccccctctctgtaaatactgttgtgcagtgcatctgtttcccaaatagtaagacaagtaattcctgtaggaacgctgcttctgtcctgggaaggctctcccattgtcagtgacacagtggtgatcctcgtattctgttgtctgagtgtaatgttgttcttggaaggatcagtttatatgacttatctaatacagtttgggatggacttggcagacaacagtttagtcagtgctgtggtttccatataaaatctcttccacttgttttcttggaacacagccctgcccatttttgcatgtgtagtgtccactgcagggctccgtggtagagatggatagttggaagggtggacatcaagtgtaaaatgcttgctctctgactcttacagaatatgtgtgtcagtttagatccttaaatgtttactttggtattattttgaatggttaattttttgttgatggaagagtacacatttagctttatctaatttgtttcatcagggtttggaaatagtgtttcgagtaggattagcgcttcttcagatgaatcaggcagaattaatgcaacttgacatggaagggatgttacaggtaagtcactcatgattccttaaatgcgtctagatttgtcattaatgagttatatacagtaacaattctgctttttcatttattatttcttagcactttcagaaggtcattccacatcagtttgatggtggcccagaaaaattaatccagtcagcttaccaagtcaaatacaactcaaaaaaaatgaaaaagtaagtaatttgtatgatcttgcagttgtggaacttactgaagcatgtaggcacttcagtggacataggaaacagtttagtgaaaagcaccatatttttcttccttaacctataaaatttttaattttactaggtagtattagcttctgtacaacacaggtaatattagactgtcattcgcttttagtagtgatacacaagatcactgtaaattacttttaaagtgccttcttgcttcccattctgacgagagttaggagtattcatgcatatgtgggcaagtgtgctgttgtctttagtatttactgttattactcttggtactggggagtgaacagagggacctagcatgctaaatacatgtttcaccaccaggttgtacaccaagcctaccatgctgtttatttacaaacatattgagtggttctaggcactgacatgctgtcctctcagttctgcctcagtgttcgttccacgcaggcagcacaaccagcagcaaggatgagattttcagattctcatcttatttctaaaacgttcaagataatcaatctcagttcccggattacatttttttctctatcatttttaaggtcagtatattaattaaggattatatctgttacttctctagctcccagtacttactgaaataactcttagcctaatggcatagttagaattcctgtccctggagcggctatggtaaaaagtgtttctaagctgcagtagcaagacctttgttgttcttttgagacagtgtctcactttgtaggtcaggctggccttgaactctggcagtcttcctaacttcacttatactaggattaaaagtatgtgccaccatgtttggcttcctccctttttctaaataaagtgttttgttccttttcagtacttactcagaggacaggatattcccatctcctccaggtccttgctctattcatattgcttctggattttatccttaacttctgtttagcattttaattgcttttatttattctgtgtgctggcacccacagacaggccgtcaggcttcatggcgtccttgcccacagtcatctcacaagccctttctttgtcttacttgtgatacggccttattgtgtggcccagaataatctgcagttcactattttcctgcctgtacctccttggtgctggaatcacaggtgtttgccaccacacctggcctctttaagctctctttattttatttttttgtgctaagaaggtaattttgcattgacacttaaaagtgccaaaacaaaaccagcatagcattctattttgctttttataaaacttaattctaaaggaatagtttatagtcattagcttagctcatattttaagtacctttttttttaaccaggaagatattcagatatatagaaaaatagattagattgataaatatccatattttgtatctagctttaacagttattaatactttgccatatttattttccttcttagaaattataaagcaaaagtacagaaaccatgatgccttattctctgctacgtcagtatttgtggtataaaacagttgcttgcttcccttactatgtgactttcacttcttaaccgtgatggtgtgtgtccagtgcatgcatcaggtgttgttgccatgaactgtatcacacgtgtggactacatctacattttcctgtcctgacctctttcccactccacccagtctagctctgctatttgtttctcatgtaaattgtttccagttatgcctcgaggagaagtaaagagatgtgttttatgttattatgttctttgttgttgttggccttttagtacagggcttctgtgtgtagccctggctgttctggaatttgctctgtaggcaaggctggcctcagaatcagagatatgcctgcctctgcctctcatgcctggctaacatgtccttttaaattaagcaatttaataactacttttgaatgaaaatatgcctttaattttctctcttctttttagacttgaaaaagaatacactacaataaaaactaaagaaatggaagaacaaggtgaaattaaagtaagcattacagggcttttcaaatagctaagataaatttttttttagccagaaatttggcagtaaagaaatttggccgggtgtggtggcgcacacctttaatcccagcactggggaggcagaggcaggtggatttctgagttcgaggccagcctggtctacaaagtgagttccaggacagccagggctatacagagaaaccctgtctcaaaaaaccaaaaaaaaaaaaaatgtgtgactgaagttgctctccgtcttgtgtgagaagaaatagctctttccctgccttgacctgctcctccacagaagaaaacatagctgtggaaactgcattcttctgaaacatttgtaaaacttgctgagaaagtgtttgctgtgttgtgcagttgagagcagagtgatttgaggttggtggtacagaacaaaggctgagctagttgggcctattgtagcatggcagcattccttggccagtataaatttatagactttaaggctttttatgctgtggtatttgtaatatgaatggaaattggtatagtttaagcaacaatttgacattttccctatgaacatttgtatttaaagttttgaataccagttatgttgttagtatctgtaggagacaagagatgttagaataagaatattataagctagaatggagataaggctcagcggataagggcactggctgcttttctagaggaccagggctcaaacccctgcacccacatggtgctcttaactgtctgtatctccatttcccaggggatccagcacattctttagaagtccttggatactatacacatgtggtgcacaaatatacattcagtcaaaactcatacccagaaaattaaaataaatctaaagagaaaaagtataagccattataaatggaggaaaccaaggctgcatatttattacgttttatgtgtagagttgcgtctcagtgagaatgaccactctgattgtttcctttgccctgccttcttactcgttgtgtgataataaacagttccttacagccattccttataaaaggtgccacactctcaacaccactacttagggatctgctgttttctctctcaagagtccttgtaaacaaactttctttttccttggcagaggctacgcacagaaaataggcttttaaaacagcgcattgaaacattagaaaaagtaagtaaacgcctattgcaagtcttctgagtgattattgtttataacaaatctttacagacgtcgtgctgaccttagcttccctagcttacatgctctctagttattagcagtgaacagccacggtaatgcttaactgaagtttttgttagagtaatgtaccgatatcctttactttcttctcatgggacctctagaaaatgtgacttagttgggagtaagtacattcagacaggatgttttaaagatgaattccaaacatgccctgtctttttgccacatgttgaacatggcagtggttccttaaggcatgtaacaaacagctttatatttagtcaaagtgactggttcgttttcatgttgattttcaacaccagataggtttataactctgtggttgttagaagtgacttgatatcctctcactagcttttccttccggttccacgtaagataatcagaaagcaagaaagttttcatatttttcttactctgattttgatagagtgtcttttgtagtggtgttttaaagaatgaattggttaatgtaatttaagagtcttcttgcagtaggcatgttgcatgcacagagtcctgattcaatcccagcactgtataatgtggacgtggagatgcacgttcataatcctagcacttgggctgtggagggccagaagttcaaagtcatccttagctacatgctgagtttcaggtcagtctggaatcagattgtgtctcaaaagcaaaaacagcaacacaagaatctcccttaattgaaaacagccaaattcagaagctttttttaaagctaaaggttcagagtaaattggtgtgaatctggcactcaggataccaccatgtttatttaaaatctctctgaaaattcttagctaaatatccaaaagagaaataactagaaagggggatagttcccaatatttgtcttttattctagaagccttcatgattttctactaagtagtcttgcagaagaacaggatatccattacaggtttgttgatggtttaatggtttcatactttataccaagtcaaatatagttcttcttataagattgtttcaaagcagcttggaaggcaattttactttttgatgattgcacatatatattgagtttattaattgtatttccctgcactcactaaacacccagcttgcagtaaaatacacagctttaagtgtctgtcaccattagagtttgatattttcatagagaaagcattacttcatcagaccttggattctaagaggatagtttgggttttgtgtctagaaaggtgagtagctgttttccactggcatctggcctcaggttttgactttacctttagaattctataagtatttcggtctcacttgaaatcctgaaccaaaaaatgttcattctggattatttagagtttaagtttctgaatttctgttgtcagctctccttccctgtttctctgatgctgatgttacactcagttgcttccatgtttgtgaatggaatttttctgacccatatctctttgtccctttcatggaagtggtttgatgatatgatttgcctaaaggctggagagatgactcagtggttaagagcactgactactcttccaaaggttctgagttcaattcccagcaaccacatggtgtctcacaaccatctgtaaagggatccgatgccatcttctggtgtgtctggaaacaactacagtgtactcatatgatttggcctaaaaaataaagatttaaaagtatattttcaagaagaaatacttgtttgtcttaagtattgaaacatttgtctcttttagagacatgattatatggaattggtttctattctgatatttctttgagatttaaaaataaaaacacatttattaaaaataaaatttaatctaaatttccattttaatgagcagtgaaaagtagatggaatttgggtgtggatgtttcttcttatccctaattttatcactttgattttctgtcttttatatttctatctaaatttttccttttgtaggaaagtgcttccttggcagatagattgatacaggtatagttttttatttttatttttagtgtttttgctaacctctaaggaatcctaaacttagaaatccatactttatgcatgcaattttacatgcatttttctagaaataattctttgggctggcatatggctgtatacttaatgttttgataaacattatcattaattgggtggctacctctgcacgttttaaagctaaccttatttttaaagtatttattttaaatggaaaacagtgggttctatgacattaaccactgttcattgacattttagctctgcatgtacaacagtaatattgcatgaattacattttttattgatttaaaagaaaaattattcttaagactatcagatgaaattttcatttagtttcctcaaatttgcgagagcaaaataacaaacttctagctaataattacctaggctattctgttctttgagtttttgtttttttttttaacatgtcagaaaaataactaaacctcacaaggcagtctgtcttgaatctattctaaattgctttatacacacaaaacaattatgtcctaagggacaagtgaccagagcccaggaggctgaggaaaactacctcataaaacgggagttggccaccatcaaacaacagactgatgcggccagggctaagctggagcaggctgaaagcaccatcagggagctccggcaccaccgccactgggtaaggagtctgctggagcacgtcttccttccctgtaggtcacaccgtgacgcacagctccgggtgtgtgttctgtaattcagaagggtcacactatggccaccgaggttcctgtgcttttctgtctgtgggtttgttagaaatagatgctattttcttttatattatactccaagtcctaggaaattagcaatgtacagtgctttgtagattttcagagatttctctcacaggagataaccctgacatgtagtttttgatccttgtaaaggtgaagttagcactcagactttagaatatgtgcatttgaaactttcataatgttgacagcttatatttcgtgaaatagtctagcttagacttcctatgtcagaacactgagttatggattagaatgtatgcttacatttacttgaagaggagacaagttgtcaaactgagagtaattcttaaaaaaatacgaattgcagctgggcggtggtggcgcacgcctttaatcccagcacttgggaggcagaggcaggcggatttctgagttccaggccagcctggtctacagagtgagttccaggatagccaaggctacacagagaaaccctgtcccgaaaaacaaaaaaacaaacaacaacaaaaaaacccgaattgcatcaacctaaaggtatgaacagccactgattatatagctagccctgagtattgtcttagtcagggtttctattgctgtgatgaaacaccatgaccaaaagcaatatggggaggagagggtttatttggttagtgcttttatggcactgtcttatcatggaaggaagtcaggacaggaactcaaacacggcaggaacctagagacaggagctgatgcagaggatgtggaggaaggttgccttttggcttgctctcatgacttcctcagcctgctttcttacagaacccaggaccacagcccaaagatggcaccacccaaaatgggctgggcccttccaaatcaatctctatttaagaaacggcctaccggcttgcctccagcctgatcttactgaggcattttctcaattggtgttccctcctcacagatgactctagctgtgttaagctgacataaaaactagctgacagccaggtgtggtggcgcacgcgtttaatcccagcactcgggaggcaaaggcaggcagatttctgagttcgaagccaccctggtctacaaagtgagttccaggacagacagggctatacagagaaaccctgtctcaacccccccccccaaaaaaaaacccaaaaaacaaaacaacaacaaaaaaaactagttggcacaggtgtcataaaattgagtcataatttcccattgtcacattcagagtaaatcgagcttaacggattgtgaggattagaaggaaaaaaagcttaacagctttataaggaacttgttgcttctgttctcaagtaggaactggaggaagagaaagtctgtcaaacctacagttctgaagaagccagaacagcagatacaatgactgcaaagtcattgactttactcagtaaaactaaggaacatcattatctgcattcaaaagttaaagcctaaaaggaaaaagggtagtgaaagccataaacatgtttttttcctattagtgaaggcagttaagaaaaatgggtatattaaagtaatattaaaaggaccacaactgcagtagtttgttctgcctttatgtgagatttaggtaataacaaggtctgaaacagaaaaatagaattcttagcaatgaaatggaaatgagctgttagtggggagctgtttgtttggaaggagaggctgctctcatgcttgcaagagcaccagctgcagttctgatgcattaaagctgtgaggcatagactacagctaatgctgacctctgcgtgacagtgagccaagtggacagagtgctggtttacagccagagtcacccgggctgacgaagacgagcagactgtgcttaggcatttctgactaaatgtaacagaaagaacctccacacttacctctgaaggttgaatagacctgtattatgcagctaacatttaccaaggagaaagcagatgtttacttcagagtttatttccctttccgcacaaggaggatgaactcttaaattatagtaaattgtagctcatagaaataaagctatgaggatatattgaataagtgaaatttagcagcatagcttcgagtgaacttccaagttcaagttttatatctaagatattaaaatgccttgcaaaattattgtagaaatagtagaaattgcattcttaggaaatgagagatgcaccaggctttaatgtagtcacgtgtttctcacagaaaacagtaagtgaaatttaggtttgtgaatgtggccttgtttatgattctataagaattcttagaaatctattttgagtcttagtgaaagttaatttgctatgtcaagacaaacatgttattttgtagcaatagctacagttttataattctttaagtttttttagtggacccttttctagtcaagacagaaattaagatgaaaatagtaaatgtaaatggctaagtgtattgagaagatatcaaagggctttgttgcttactcctgtgtaatatattagactgcccatatgcatggtatgttcaagaacattatatgtgaactattttaaaaatatactgccctcaaaattaagattcaagcatttatcttaccaatgtcatatgtagcaaaattatgagagattttaattgagagagaatcagaattttatccattgcattttttgacagaagaaatatttttcaaagtagtggatatgccagtgatgggaagtaagtacagttattgctgatttgtttatagtcttcccttaagtacaagtttatgaatgtttgacctctcacggtcagtgcttacaacccacactccagcaggaggtaatgagtttctagtacagcttccttctgctaccacccactcctgccatcttcatagctcttcctatgctgtgaagagctttaggttctagtcctattttgctaactgtaatctgtgatatttaatgcacttttgtttggtttcagaaatgatttaagtagagctagaccattttaagtctttcttttttacataatttgtgaaatttaagtatgaaatttgatgtgtttaaatgtagagaggttgtataatcaccacaataaaaatgacaattttcatccctctcagaatgtgttgggttacagttcattttctaccctcagcagtgtctgaaagaagactggaatatattcataattaactgaagacatatgaacatgtgaacatgtgtgagctccatcaccaccatgcttagctagagaaatttaaaacggttgtgttatgtgaggcactaagtcttaaaacaataatttgttttgcccttaaatatatagattcatgagagtaaattgaacttaaagcaaaagaaaaaagaaaaatattgagtggaaaaaaataaaaaggaaagagaacatggcagttcctaggtctggtagaaaagaaagtttattatagataaaaaggagagtataggtagagacagagtcatctgggagagtccagagaagtcagagtcagaccagattgagctgggccatggaggacttggggggaagagaggggagtcaggtatagcagccaggaggtcaaaaggtacaaagagagccagtaactaagatggttggattctgtaaggaagagcaaccgctcagcgccctggactggagagttcagggtaaggaacagggtacgccatctaggagggttggggctgaggcattctgggagaacctggagaccaggtctacttagatatgtgaaatagtcaccttatccatttttcctggggtttgcaacctaacagaaatcaaatagaaagctacacagagaaagtcaagagcgttcgtgtaaccacaagctgagtctttgaatgatgagtgaagtcactaggcctctgtctgtagtgactaaagaagggggagagacagtaacctttgaagtaccagtgacctttgcagataggactcaattgttttactttatatctgaatttttctgattctttcccattgtatcattgtattttctataaactagattcaattagacatttagatgagagagaacattgtagaattcattttgtttttaatcagaaactgagttgtgtcctagaccagtgttgaattttgtttctaggcttagattggtattggtactgtagcctcccttgtaaagatgtgacttgatctttacaactaactgttaagtaatctattgggaatacttttgtaccaaataattacagctatttcttggtatctgtaggatgactggttctaggaattcctgtgtacacttaaatctgtgtctgttcaaattcctacatagcatggcatggcatcatattagcatatacccactacatatccttctgtgtacttcaaacatttctaagtgacttatgcctaatccagtgtgataaatagttattatactatattacttaaaaaataatatcaagaaaaaattgacgtgggtttgtttgtacaactttccatccttggattgtgtctaaaaatatggaactcaacgatgtggtggggtctgtctatataatccctatgtctctatctaaaggacatgtaaagttaattattacattagttttccaaagtgatggtttttatattctctgatttgttctgcacttattagtgttcttctgaaagaactggttcctatctttcctcctttgaccttttttccttcgcagccccataggagagcctcctgtatgactctaggtttatagacttttgtttattcaacatttcataagatctttaatggtttaatgcagttagtatagtgatatgtcatgttcatttaaacttaaaaggtgtaagacttatcttctaaattattgaaagttgtgaatttttctaaataatttgagaaaatgtgtttagtatcacataggaattttatatacctgacttaaccagtgggtcagttttcctgataaaactgaaaaatagttgaaatgtctttcaaaaatccaccactaagtgactttacacatttaatcttgtaatcttgcttttctttttttttttttttaaggtggggtcctatgcattgagtccagggttttatgcatgttaagcacatttactaaccctgaaccacattccaacctcttacaaattcttaagattggtcagtatgtataaatctgggcagaacttttaaaagtactgttgaggggctggagataagcctccgcagttacagatacttactactctttcagaggacccagttcaattcccagtaccgacatctagctgttcatagctgcctgtagctccaccttcagaatgtctgatgtcctctcctggtctgtgagaggttgcgcacatgtgttatagattcttagacactcacatatgcatgtaaatttaaaaataataacctttaaaaaacaaggttattttggctttgctctaaaggttaagtgtttcatatttacatgtaattttttgaatttaatttttaataacaagaggtcaccaaagtgagaatctttttcttagcatatctttgtcattacagcaattaaaaataactagagataaattttcattttaaaagatttatgcaatttttctgatatttaaaggaaataatatttccatgatgggtattttttgatagccctgagatctgacctcagggcttcatacatctggatacgtgctctgtcacctagttgtgtccctaggcctgtttttacattttgtcttgatacatggtctcactaagttgcacatagtgactctgtagcccaaactagctttaaatgtttgattctcctcttagttcccagctgctttagtttataggcatgtgccactatgcctggttaaaaagcaacagcaacagccaaaacccctggccattttgggcatgtaggcatgacggctgtggccatctcggtgccatgtgctggaggaggtcggaatgttacagaagtctgctctggagtactctgacgttaaaaaaattttttttttaaattccagatgcttatgaatagtcacatgtactgtcttactgtttgtcttatacttacatgtattattacatattttgtcttaagtataaattaaaaacattgtatcattttaaaaagtagctctaaattgctagaggatgtttgataaaaataggttatttttgcagcatataacttctatatctcatgtctcacacaaattatctaacataggatttgcttgtaggtaagttaattaattaatcaagtaaaatactatttgcttactaactgtaagaagtgctgttcattttttttctgtccctggccctgctgctataggatatatagagaacttttatattatttttacacttttttgagttatgagaaatgctataaaagagaaggttcaagagttgtatggcttcctttataaaggatatgtaaatgtataaggtatcttttgtttgtttgattttttttttcttttgaggcagggtctctctgtggatgtataatatcttgaacttagagaacagcactgttaccatgagatgtgtgtgtgcacacatgtgcatgtgcacactcatggcttgccataggcttttgaaacctgaaagcccacccctaatgattcacttcctccaacaaagctacaccccctaatccttgtaatcctttcaagtagtgccactccttggtgactaagcattcagatatatgagccataggggccattcttactcaaaccactgcaagtactgtgtaaaattagtgtgtgaaagagttccatagatttccctttttagattggaatcttttcagtcaccatacagaatgagcatccctgttctgagtgtacaaaatgtcctgaaacttttgagcactattctctcactgtaaaatttatggattttggagcattttggaatgtggattttaattttaagagatgatctactgttaaaaatctatgcaaaaattctcagatctcaaatctaaagaacttctctatatttcaggcaaaggattagccattctttgtgagaaatatccccaaatactcacactcagtttgcactgtgtcattaccctttttcctgttttcacctgtgagaatttttttaattcaagacagaagcagagaccatcacatttgcagcttttcgcaatatcagaagattacttgagattgaaaagcagagccatgtactaagaaaccgttctgacagtgtccttgggacacttgggcctgctgggatcacaggatcacaaagagattcatttcctgaacttgatgcaaatgtagggaagccattttctgtttatgtgtggactgaaataaatgggtccttttctgactatcggctattagaattatggtagttgtcatgtagtaaaaacaaagtatgtgtatgtccaggttaataatttgaatattaaatgcagtcttcaggaactttttatagtaagaattctgtgtctatgtttcagtttataaaaattgcaagcttgtggtatgttgataaactttattgattaaaaacatgtttctagttgttctttagtgttctagtatatggttgaagtaatttgtttctgtcagtttgaggattctgctttcttttttaaaattttatttatttattcttctctcatactgtataccccaattacagcctcccttccgtccaatccttccagccccttctcccccgactcccaggtctactgctcctctgtttcctttcggaaaacaacatgcctcccagtgatatcaaccaaacttggcataacaagatgcaggaagataggcataaccctcatgtcaaggctggacaagacatcccgtagaagaaaaaaggcacaaggaggcagaagagtcatagaaacccccatttcccttgttaggagtcccaacaaaatccccaagctagagaagcacagaatgtatgcagaggcctggtgcagactcatgcaggcatcatggttggcacttccatctctgtgagctttgctgagttggttctgtcaaccgaggttttcctgactcccctgactcctacagtcttcccgcctcctcttctgtggaggaggattctattttgatgtgagccatttgagctttatattttcttagtgctttcctcatacaggatattggcaagctgattgagcagatcttatcagagctacatcttaagaactaacaatataggtaatgttcacagaataactgatctatgatttcattaatacatatggtacctttagcttggctgaggtcattctgaaagagtatattttgtttgacaaggtgcttactaaggatggttgcaaatgaactttctctataagcattattttaatagatccagaattactagaggtgacatgttggttacagtgccttagattgacttaggtccagtgacataagcaggaagcacaagttcagttcttacctgaccagcttagtggggccaaggtgccctgtgatgtagcttagtgatggaatccttgcctaggtacaaagcctgggggtcagtcaaccgggctagaaggaggccatgtctccatttgtacatctgttaggaaaatggagttttgtaaaattgaaatgctttcatgaaagcatttggtcatttttaatagttttaatttgatattcattttatttctaatgtcgagtagaaagaaccattcttcacccaaaacagttcactttggagattgttctctgtagcttttaaattttggaattgccagctttttaattacctgagttaagtctaaagtgatagctatctgattttaagtgtttgtatcatgtatgagtatattatgtgtgcgcacacacacagagtgaagagttagatatcatgctccctcctgcctcctatcttcttcttttttgagataggagcttaatataaatcccagtctggtgtggaactcatgattcttctgcctcagcttctaaaatgggatcatttatgtacaccagcacctcagctcagttatatatttattgcttttacactacagcttttatatgtactgggctttaagaaaatataagtggccgcattggcgcgacgtgtgtgtgtgtgtgtgtgtgtgtgtgtgtgtgtgtgtgtgtgtaaaggtgccacacctctgtggcttttttctttgtgtagcatttttttttttgcttaagagtaatctttgcaaatattttaaagaaattgacatctttaaagcaaatacacttacccttccttaggatttaagatgcttcaccttatccattgttgtcagtttttactttcaatgcattaaaaatagatttaaaaaaagatttatttattgttatatgtaagtacactgtagctgtcttcagacacaccagaagagggtgtcagatcccattacagatggttgtgagccaccttgtggatgctgggatttgaatttaggacctctggaagagcagtcagtgctcttaactgctgagctatctctccagccccaagaatagaaattttaaggctttgtatgttcctgtaatctacaatgtgagtaaatatgcagtctaagaaattgtattatccatactgaaaagagtaaaagggaaattaatgtttttttcttacctcggtgtatttaaaatattaacaacatccaatcaacataaaaaccattgtgttatttttttatgtgtctatttaattttatacttttggtggtcctgggggttgaactcaagggacagatgtgcactaaaaatgagtttgtgtcttttgttcataaccatattctgcaaggattatgtgtgtttcaaggactaagtggttgcataaggctaatgtgtactgttttgtgcagatcatgtctatctatagagtcagaataaattcttagtgtcttcataggtggacagaaaaaagacagtcactttatatgatctttcaggaatgtaatagcttgttaccaaaaccaaaaaatatgataactataactactgaaactaacttactgacctacctacgttccttcctccctcccccccccctctcagcccatttgctgggaaaatgaaataatttgaaatactggatataattttactttttagttgctcataatacccaagttaaataatttcattatttttcctctttgtatatatttacacatttgtgtttccacgaaatttcagtaaatgttcataatctttagcataaatgcagttccacctacaacgaagatttcgtgctgcagctggagaaggaattggttcaagccagactgagtgaagccgagtctcagtgtgcactgaaggagatgcaggataaagtgttggatatagagaaggtaagagactccataagtagtacctgcttctaaatctgagggagatgtgctagatacttgttaagtactaattaaagagttgaattgatgttttttacacatgaggaactatgagtattagttattgaatcagcaaataaggaaatgttgctagctggcatggtgcctcctagaatgcatgaggtcctgggttcaccctgcagcacacaaagccaggtatggggcacacacttctgatgtggagggaagctcaaggtcagtcttgactacctggttagttggaggtcagctggtgtgcatgagccccggtctaaagagagagtggataggcagaaaataaacagaaccttaaggctcccaattcagaaaatcctttactgtgtcagtgggttcagggttattctcttctcctcttccatctgattcagggtatctggtctttacattgaggacttggtccatttggggttgagttttgtgcagtgataaatatggatctatttgcatctttctttaagcagccattcagtgatcaacggtttgttgaagatgctcttttctccgatgtgcaattttggattattaaaaagcaggcatccataggtgtgcagacttgtatctggagctccccttggagtctgctgactcagctggtttagttggtcaatgtgtctgctttcttgtcagcactgggctacttttcctattacagccgagtagtcaccttcacctctagcagctcgtccgttatgcagtcttgcttcagctactccaggacttttgtgttcccatacaaaactgaagattgattttccatttctctggagaatcgtgttgggattttaatgggaattacattgaatttgtagattgctcttggtaggatgtccacttttactatattaattctaccattccatgagcatgagagatcatgtcatcttctgaggtcttcagttaagtgtgccagttctctttgttactttgatacaactccatgttccatatttaagaatatgaatagagatgtgttctatccccagaatctgcatggtagaaggagagaggactagtgcctacagcttattctccagcctccacacatgtatacatgtaaaaaaacaggaatacacaactaatttttaaaaaatctcaaatttttctgactttagaagaacaactcatttcctgatgagaataatattgcaaggcttcaggaggaactcatcgctgtgaagctgagggaagccgaagccattatgggtttgaaagaacttcgacagcaagtcagaaccttagaagagcactggcaggtatgtcaggcctgacgtgctttctgaaaggaactaaaaccgatgcacttagtttgtgtgaatttgaaatagctggtaatgaagaatcttgctttgtgtcacgattgagacacccccaaatcctcccagacacatcctttgccttccttcccacctttaggtcctccttttcctaaactcactagtacagtttgtgctgcccagatacttatggttatagggtcatccatttgagtatgattaatctactaggagccacattttttctttttctttttctttttctttttctttttctttttctttttctttttctttttctttttctttttctttttcttttccttttttttttttttttttttttgagacagggatctctgtgtagccctggctgtcctggaactcactctgtagaccaggctgtccttgaactcagaaatctgcctgcctctgcctcccaagttttgggattaaaggtgtgtaccaccactgcccaactgaggggccacattcttaaagaaaactgatgctgccttatccaggagcaactgtcaggagctcaagaacttggcctgcttcatgctggaatgctctctggcttgattattatacagctgctgagagctcaggagtgcagtggtcctgtgactcccagaagacactgctgtgccccagtcttccccaatcactggctttaggcttttccatcctctctgacagtggtccccaggtcttgctggcaggaagtgtgacacagatgcctcctttatggctgagctgtccatgtgaacttgttctctgcactttgatcacttgccagcttctgtgttagctacagcccactgcacggggaaatttgtctgatgaattgcagtaacttatggtatagaaatggaatttatatttttggttgtgaacctagcctttaactgctgagccatctctccagccctagaaatggaactcagagggcaagttgatagtctattcatttatcaaccaaagattttctttactatttggaaagtgtgaaacacctgaaggggacgccaatgatatatgtacatttttaacttcttttgaaaatgcttgtgacaaaataaatgctgctttaggtatattcccacaaatgtatctacttgtgagagaaattagggaaagagcaaaatgtagcaatctgtaagacagagaggaatgagtttttaaaaagtaggtactggggtggtgaagcgcacacctttaattccagcacttaggaggcagaggcagtcagatttctgagtttgaggccagactggtctacagagtgacttccaggacagccagggctacacagagaaaccctgtcttcaaccccccccccccaaaaaaaaaaaaccctacacagtttcagaatggtggactttgtttgaatggggtgggagggttggggaactgggggaaggttgagagggtgggaggatgggaagagagagagatctagtaaatgttgaacttggtctttgaggggtcctgtgagacgactcagtgcgaggagacagttgctgcaaggcctcggaggacctgagttgggtcccctggattcacactgtgaaagagaactgactcttgcaggttgtcctctgcgctccatgtatgtgctgtggagcatccccaccccaaaaccagtgatatgtgtaatataattttagaagaacatggcttttaaaaaatgaattttgaaaaatacccaggtttgcaacagtttaaattaagctgggcatggtggtgtgtatctggaatcgcagctcttaggaggcctgagacaggaagagcatatgtctagccaaccaggagtactaattacaaagcaaaagcgtctcttagcaaacagtgcttacacacgtgctctgtaaagtttgttcatcctctatagagtacttgttgcgatatagtaatgttttatgctttagcgtcacttagctcgaacttctggaagatggaaagacccacccaagaaaaatgctgtgaatgagttacaggatgagctgatgagcattcgccttagagaggcggaaacacaggcagaaataagagagatgaagcaaaggatgatggaaatggagacacaggtatggcgggcaggcccaggtgggtggaatacatctctagatccaagtcttacacagttgttttctcaaaagtaactgactataaagttaggaagagtgaaaatgtaggttttaaatgcgaagtttgaatgccatgccactgtgtttaagggagtggtaagtgaatgaggttcacggtggtgtaatcctgagaactgacataaaagctgaggtctagacagtagtttctagtcctcacgcagacagctaaaacctacctattgctgtctgctcctgttcttttaagacagcacctgttaccaaagcgggagctccagcaatgcaccattgttgttgttgttgtttgtttcaattaagctggctggctagcaacttcagtctgtctgtgtaaccctagagttataaatgtgagcccacctttcatatgagtgctggggatctagactcaggtctccaggcttatgcagcaggcgctctcactgggccattgcgccagtactgtttgctttgttttagctttgtttttgtggattattattattattattattattattattattattattattattattattgagacaaagttgtgctatatccctggctggcttgtcactcactctgtatcctggattggcctcaaactaatgacagataatgccccagcctcccagtgctggcattataggcagaaagattttttttcttctgagatacaatctctgctttgacccttcaataaaattgaaacaagttagacttttgggcttattagtaaaactcatagagttgccttattgcacaaattaagaaggaaaatttatgtagagcaagattcctcaacttgaatattttttaaacgtttgagcaagaaattatttgttttatttatctagcctgtgcattataggatttttagcagcatcctggctctgcctaccagatggttttctgtgtaatggctaaaactgtctctatacatttccagtagagaatcatgtgtctgctacaatgtgcattctgccttttcaagtatgatcctgagtaattaagtctcctaatgttcccttttctgtattaaatgcctatcttaaatatatttggcctaagatgtgcaaatcattttgtttataaaacctgttgtattgtaaaggtaagtttggcttttttgaattacattcttctgagctatatttcacataaggttgtcctgtgggatccatggggcagattacagaatctctgctagtactgcaatcttcaggtgctcaagttccttaaataaaatggtttattatttttatataatatttgtaataatatatgtatatgcattctccagtatactttaaaccatccttaggtacaaggcctaatatagcactaatagaaataatttttacagtatactgtttagggaataataaatgtctacacatgtgcagtacagatacactttcaaaaacttcaatccttagcagtgtgaattcatggatacataggaggggtaactaagcatgtgattggttttcagaggatctcttcagtcagtagggggcatagtctactcatgcggcactttgtatctcaatgacattccatgtcaggcacgagatagtgaataagcagttcttaggataaacatagcttgtttcttatcatctaattactttcaaaaagttttattgaaattaaaaatatgaaagaggctagaattaggaaaagtagaaattagattttatagtggaaagttttattttatgagcaaaattcatttatatctctacgtaagcttatatatgattatgacccatatatatatctcctatcagataattcaatttctgtgtcatcctaaggctgattctgcacactggttggtctcttgttatgtacttctgtctctccttgctttgtcacatgctttgtaaattattgcacacattttcatgtgccccaataagtgtacaccaagaaagattggttatcttgaaacagacatccatagtatggggaaggggctagatagcagcaattgggtatcttgtatagggcaataaataactaaggtaaatagtttttgtgcctagcaatgggtacatatttccctctgccaggcctttcatgtggcaagtttgagttaatactgtcagatgggctgagctgagttttgctctgtggttatgcgaagtgcacttcagggttcaaattcctttggcattacctcattttcagaacgagggctggtttcccagacagcttttgtcctgtctgtattctgtgtcatatcctagagtcgggactggagtcagcagtattcctctattactgttgcaaggaattagaggggcaagggtgttttctgataatcctcagccttagcctccattttgtttttgtatcagaggtatttggaaataattgcctggttaaatgtattctaaaggcagtaattatatcttgattttgaacaggccctcagaagaacttgctgcgttcatgcatgttacatattatttcgtacacagcttgtaagcctctgggtgattgggtgccgctgtggtcgtctgtgctcagtgttcatttgatttggtctttctaatcttctgtttattctgactgctgcatctttccttcctttccttccttccccttcccctcttccttctttgttgcccaggctggcctcaaactcatgatccatgcaatagctaggattataggtgtgtgtatcattccacttggctttctctgacttcctgaaattgaggttgcctttattcttatacgagcacttaattgagtaaagttttgtaggctgaaaacaatctctaaagcattacatatttgctggaaagtgccttcattctctttccttcatatatactgtgttttccttgacttgcatatttcgttagcactctgaacctcttcttactttgggtcatggtttcaccaagtcacgtggacttgccttgacttcacagcatagtccaagttggcttggaatttgtgatcctcttgtctcagcctcctgagtagctgggaatataaccttacctaactaggcctagactttgcccactttttttttcttttcttttcttttcttttcttttctttttttttttttttttttttttttttggggcaggcaggggaagaataaaattttctcaaatattaatggaccttaacatggctttttaaaaatgctgaaaaattggaccttcttttattttctgtgtcttatacattctttttcaacactaatatttttcagtattcatgcctaatcttatatttaatcctttcattgtgtgtgttatgaatatgtacatatttgtatatgtttgggtgtgagtatggaggccagaggttgacttggggtgtcttcctggatcactgttcatgttattttttgggacaggtctccctttgaacctagagttcatttattggctaggataggtgccaatgagctctagaggtcgttatctctgtcttcccttgctgtttgcaccccagtgttggggttacagatatgtgccactatgcccatcttttatgctgggtgttagagatgaaaactgaagtctttgtggccatacacgacaagcatttaacttactgaggtgttgctccagccctcattggattcctagtatcagcagttatattggtttttagaaattttatttgattagtttttaaatttgcaaaatttcagagacatgatgacacacctttattatcttttaaaagacttatttattatatgtatatgagcacactgtagttgtcttcagacacaccagaagggggcatcagatcccattacagatggttgtgagccaccatgtggttgctgggaattgaactcagctcctctggtagagcagcgactgctctcaaccactgagctatgtctccagcctggtgacacacatttataattacaacattcagcagggaaaaccagaatggttatgagtaccagactaacccagctacatactaagacagtagctcaaaaattaaagtatttttggccaaattcactgttccacctccccctgctctgactttgaagtggcactgtgttcttcagggtggccttgatcttgggtctcaagtgctgaggttttgggcctgccctgctctgccacttctgcacggcctctcatggctcctcttcttagtatgcttttcttcttccctttatatctttaataatttaagcatttattttatttgaagtcataaaattacctcactatgagaaattattagaatatactcttcttttttgtcatgcactgttctcacgcacaattaagtcttaagttgtggttttgtatttcattgttggaaaattctttgcagccgtgttgaaggaacatccctctgaaatagagttatgtgcttcagtggtagctcataagacaaagcttatagattttttttttgtataaatgatatattgaggtctagaatttttagtatttctagcattttgaagcaggatctcatgtagcccaggctaacctcaaactcactacaaagacaaagctggtctagtactcctgaccttcttgcatctaccttctaaatactgggattgcaggtgtgggcaacaatgcctggctaatgtgttggttaagagtttgtaatattctttcggagaattcaggtctttttcttttaaagatttttcttttcttttttcttttcttttcttttcttttcttttcttttcctttctctctctctctctctctctctctctctctctctctctctttctttttgtttttttggtttttttttgttttgttttgtttttttttgaggtctatatagaatgggatgtcctcagattcactgtgtagcccaggctgtccttaaactcttactgaacatccttcctcatcctttcaattacaggaactacatatgccacacaattggcggaggattattatactaaaattatactaatataataatataattaagtaatttaaataagtaatatataaaaagctgttgtatatctttcttccattttagtacacattttaagtaactttttataaggctgttgaagtataagatggacagataaaaaattattaaaaatttccatcctttatctatagtgtgtctatttgcatttctcactagaaccagatcaatagtaaccaacttcgaagagcggagcaagaggtgaacagtctgcaggagaaggtgtgctcgctgtctgtgaagaacaagggcttgcttgcccagttaagtgaggcaaagcgcagacaggcagagattgaatgcaaggtgagtgtcagtgcagtagggctttatacatttatcaggattgggttttgtggttttgttttgtttgtttttgaaaacagactttgaatatatagccctggctagcctggattttgctttatagaccaaactggcttcaaaatcccattgattcttttacctctgtctcttattgctgggatcacaggcatgtgccacacccagagtaaattttccttcttttttcctggtcttgttttagtggttgttctcagacaaggttagctcattttgttcagagggtaagtttcagggaggaaacctcagttttaaccttaaccttgattaagttaatgtcttaactaatgctcctttgtgatgtgccttttgagggttagccctttaaaatgcagcttgtaatggctcacctgaaaatgcaggtaattgcagaggttgaagttcctcccttgactcatcatattagcaggcaggcagtcacaactaatgtttttgtgtaacagagagagcaggagaaatgtatgtgcgcaagtgggttaagaaaaatgagcacaatttctgttaagctttcaaaataaattgcattaaaataaattccttttttatgaaaggaacttaagtagctttaggtaatgaggacagttggctggcgccatcaagtggagaacagcacggacacacacgcacaagtgtgtgtgaaaatcactaaagagatgcatgccatctgaggcctagtgcggattcctgaagggaagttgtgaaacttttaacagaaagtactaatctccttagcagatggtaggtctcatatatgcaagctttattattctatgaaaaataagactttcagtggcacatataaagctgtaattccatcaactcgtcctggtgtcattaaaaccaagagtgaagcttgagtggtttatcagtgtcattgaaatccagagatgaaattacatcctaatcaatattcatggccgttagaatttagactgaagaaatctgtaggcagcagtagaattgtactaacttgaagaattgaccctttctaaattgcaactggattcatttagaaataaggtagtgcacagtgaggttacgtccctgtgacttgtcacagtggtagctggcagaccgtaatgccacattgcccttgccgattcatcattaacagagtattaaatttaattttctctatatggatgtcagttttctttaaacattttggtaacagtgtttctgaatttaatattgttttagcacctgttagcaaaataaaaaaaaatgttcagttatgaagatacttgttttgaatttttctaagtaatgaataaagactcagaaaaggagactcggcagatggatacaggatttttttcttagtttttatttgttcatctttgccttgtgaagtacactgaggacactagctctgatatacccttgtgtgcgagctctaagttgattcagccttctctattgccttttgcagatcttggaattaatgttagtgtattaattgtcattctgacacccagtaacctgtttatttcccttgttaaagtgtaacaattccataagaactgtaacttttcaaggaagccagtcccttagttatataggtagattcattttcattaaggttttttgtgattaaggcttatgatttgtctttgagtaatctttaaagctcatttttcacttatataaagtatctggatagtatttgtattaacattattttcactctactcgaatatcaaaattaatttgaatattctcactttaaatagtaaaagcctataattcccagttttacaatcccgaacacctgaatcacaaaagttttttcttaaattttacacaggttcatttggaggcagaacctgatctgaattgataaatggccacttctaagttgtttttgtcctgtttgttgtggttgtttataccaggctgctcagacactgctgggtaatgctaatgtgcagtttatacaccttaatattttgaaaatgcttgctttttgaactcacctgttttgttgctgtgtcttgtttgctgctgtagaacaaggaggaagtcatggctgtgcggctccgggaagctgatagcatcgcggccgtggctgagctgcagcagcacattgctgagcttgaaatccaggtatgtatgctgtgggagtgcagaggtgggccttcctctctgtgtctgcctccctcctgatgccaatattagtctgcttcaggatgcttttgtgtgtgcggggggnnnnnnnnnnnnnnnnnnnnnnnnnnnnnnnngccagagatggaagctggacgtcttcattgctgttcactttatttcctgagggagggtctcttactggcatggttggtcttgctagctagcttacctcagggatcccttatctctgccttctgactgctggcattgcaggcagctaccatgcttagttgacatttatgtgggtgctgaggagctgaactctggtccccctagaggtaagtggtaagtgctctacctattgattaatctcctcagccttgggggcatttttatttatacatagcataaaacttttaagattcactattctgtgacattaagaacatgcatgctgttatatgaccaccaatgccatctagaacttcttcattttctgcatgaaactcagtgtgtccattaaatactaacttgacattccttcctttcatagcccctggcattcaccattatagtgttagtgtcttttctctctgaatttgaccactctagggatctgtccacatcatgatctcatgatctagggatcatgagacatctctgacaggctcgtttcccttagcatgaagttcttaggttcactcatgcagtgtatacttttttttaaaactaaatgcatccttcattgcatgtgcagtatattgtctattctttcatttatctacctttgctgttgtgaacaatgctgctatggccagagatgtgtaaatacctgccagacatcctgcactcagctctatgaatgctctacaactactgggttatataaacagtgcttctgtttttttttttttttttttttttttggaattgcaatgctattttctgtaaaacatatcattcttacatccgtaatttagagcacaaaaattccattgtttcttctgttggacacttttttttaagatttatttttttactttatgtgtataatgtttggcctacatatcacagaacccacaaaagagtttcagatccctacagatggttgtttttgatgcacaaaagcttttaatttttttgaagtccaaaatctcagcaaagaacttgggttttgcttttgttatagttctcagtccatttttgagtaacactttataatgtctctgcactgccagttttatttaaaaaaagataatttactcccatcacttgtgaggctatagtaggagattacaagtgctgaatttctgccccaccctaaagtaatgttgagaatcctactttcccccttaaggtctagttttattttgttttgttttacgtgtttgagtattttgcctgtgtgtatatctctgaaccatgaggcagtcatagcagggtattgggccccctgaaattggaactataaatggttgtgagtcaccatgtggctgctgaatcttggtccactacaatagtaataaatactcttaactgctgaaccatgtcctgccccgtgccccacttttatttctttaatttataaactaggataaagaagttagtttcctatatgaactaggataaagaagttagtttcctatatgaacaaagtattacagggtttgtttgtctgtttggtgtattagttacaccaaacagagttggagttttatcatctagagaagtcagggccaggcagagactgaagtggaagccactaaagaacaccatgaacagggctactccacgtagcttgctcagcctgctttcttaaagcactcaggatcaacactcacaatgagctgggccctcccatatcaatcatcaatcaagaaagtctacctgaggcttgttcacaggtaaatctggtgtgtgaggtcttttcccaattgggactccttcccagatgtggccttgtgtcaagttgacataaaactggctagcatgttagtttaaggtttgtttgtttgtttgtttgttttggttttggttttttttgagacagagtctccatatatagcctagggtgccctggaactcactatgtagtgcatgctggcccagaattcccagaagtactcctttctctgcatctagactgccgtgattgcaggtatgagataccatgcctggcttgtaaattagttacttaaattatacacaaatctgtatggactttttcaaaagattgccacctgtcttagttactgttctagtgctctgaggagacaccatgaccaaagcatctcataagagaacattagttgaggggttagtcaatggtcattatggtgggaagaaaacaggtgtagtgctagagcagtagctgagaactttacatcctgatccacaaacagcaaccccagagagaagagacagggagaatgagtagtcctgacagaggcttttgaaacctcaaagccttcccgcagcagtgcaccttcaacaaagtcacacctctcattccccccaaacagttccactaacttgcattcagacatatgaacctatggggtcattctcattcaaaccactgcaccatctttctaaacacaaaacaactatggtctttacctaggtgtggtggctcatgcctgtagcctcagcagcctctgtgtgtgtatgtgtgtgtgtgtcacacgtgtgagtttgcaggtgtgtgttctcatgcacatatatgtagaagctagaactgcgcatggtgtggaatcttctattgctcttagtatatattgccttgagacccactgttttgctagactgactggccagtgagctccctgatgtggccacaggcttgtggacactgggatttacactgatgtcctcatcttgtagagtaaactttttaacccactgagccaaattagtttttttgatattgaaatacttactaaaactaagaaactcatattctgcatgttttgcttaagtgaaatctacatgttacatcatattatgaaaagtgaagaaagatgcatcaaatattcttaagtatttctctaacttgctatgccaggcccttagtaatcatgttttcatttccttaaaattttttcctttttttaattttatttacatttcaaatgttatcctctttcccaattcccccctcccagaagccccctatcctatctccctccttcttctatgagggtgtgcacccccaccccacccccactcctacctcccagccctcactttcccctacattggggtgtcgaaccttcacagaccaagggcctcttctcccattgatgaccaacaaggccatcctctactacatatatggctggagccatgggtccctccatgcgtactccttggttggtggtttagaccctgggatctttggttggatgatattgttgttcttcctatagggttccaaactccttcagctccttcagtcctttctctaactcctccattggggacgccatggttcagtggttggctgcgagcatccacctctgtatttgtcaggctctggcgtagcctctcaggagacagctatatcaggctcctgtcagcatacacttcttgacatccacaatagtgtttgtgtttggtgactatatatggcttggatccccaggtggggcagtttctggatggccttttcttcaatgtgtgttccacattttgtttctatatttgctcccgtattttgttaccctttctaagaaggaccaaagtatccacactttggtcttccttcttcttgagcttcatttggtctgtgaattgtatcttgggtattctgatcttttgggctaatatctactatcagtgagtgcataccatgtgtgttcttttgtgattgggttacctcgttttctgttgttatgtatcccccccattttttaaagatttatttattattatatctaagtacactgtagctgtcttcagatgcaccagaagaagacatcagatttcattacagatggttgtgagccacaatgtggttgatgcgattagaactcaggactttcagaagagcagtcggatgctcttaaccactgagccatctccccagcccatgtctcccctttcagttctgatttttttattaatttggatactgtctctgtgccctctggttagtttggctaagagaaatcacattttgttgccttgctatgaggtcagttttcttagattccagtgtgagtgagtgtatgggtttatctatgttgaaaatgagatgatttctttttattactattaattttttttttaggcagaatctcattgtgatgctcatactagcctaaagtttattgccccgggctatcctcaaacccatgatcttctgcttatttctgagtgctaggattatagtgtgtaccctcacaaccagcacatttcctatctttttatagactaagttgcattctattgtattcattaacattttctccatccgctcatccacacttgcacacttgcacacacccacacatccagagatgcacacatcacacatatatatgctgaagttccatgttgtgactgctgtgaaatcagtatcttgaatcttgatttctagaccatttattaccacattagagatgttgaggcccggagtgacttcaaatacttctttcttacctccataattcgtgccagaggtgcaagtgtaagatatgcaagctttcagcttcagtagctaacattattttgcactttatagttactttcttgccagtattttacctgctgtatggactagtgctataaaaggcaaagctagcattttctcctgtccattttactactgaatatttttctgagtcagaaatctcccatctgttttttttttttttcccttggcctcagctggaggaaactttcctaagttaccagagctgcctttgtttgacaaaagtgtttgttggttgtctttccctacccaaatcctgtcagagtgcctcagtgtgagagcattgccctggctctcagcatcatgtctccatctcacacacagcactgcccaggtttctctagactgtcctgcaggggccctcatgcccttctgcacactgtagtcgtctttaactttctgtactttctacttttgaggacgctcacttatccttctggactgaggcttgtgtgctcctgatctgacttgctgttaagtcacttagaaaggaaaatttcagtgaatgtctcagtggctcaacatgtatttattttattttatttttggttttttgagacagggtttctctgtgtagccctggctgtcctggaactcactttgtagaccaggctggtctcgaactcaggaaatccgtccgcctctgcttcccaagtgctgggattaaaggtgtgtgccactacgcccggctcaacatttattttatttaatgtagattagatccacagacagcaattgtagcactcagaagatagagacagaagattgaaagttcaaggccagcatgagccttaaaaacaacctcttaaattatttctgtttaaatttgaaacttttttttttaaaatataactacactttagatagttcacagttgtggaaatatgtcagatcattctcaagttccactaggtggggactatgagtctctattttgtatctcttcagattaatacttccagttagtggtctatagccttggctaacctgaaactcataagatattctcgcctctgactccagagcactaggctcagcatttgttactttctcataaactaaaattttcaagtccttggtgtaataaatcatattgttatataacatgattttattttggactatgtaatctattcatataattaaagccgtctttgtagtgtaattatgaatatccatctatcattgatctatcatttatctctctgcctgcctgcctatctacttacctatgctaaggacttaacccagggccatgtgcattctgcacaattaattgatcatgaagttacattgcatttggttctttttaaagcttagttaagacagggtcccactgttttccatgatggcctcagactcatgatactcctgttggggctgtaaagcagccggacttacaggtgtctcacagcaggcctggctccagacttccatcttagtaacgttcccatcttgaaaaaaaaaggaaaaagaaaagcttgcatgtgtggatgtgcactgcatgcatgcctcctgcccccatgccagaggaaggtgccagcacccttgatgtggagttggggagggttgtgatccacctggtgtgagtcccagggactgaatgcggcagggtcttctgcagagcggtgagtgcttttagctgctgagctctctccagccctcaacattccagttttaattactacacttaaagctgctttatttgtctatttatatatagctttaaaataaatggattcttaggatacataaaagcataattgaatatatttatggagtactatgtgatgcttccaattacgtgtatgctatgctctgtatgttgtttaaatcaggttaaacacagctgttttctcatacatttatttgttcattttgagatagggtctcaaaagccccagattataattaaaactcgggaccccatgtgtgcacattatgactgttggcatcacaggcctacttcactgttcctgaaacatggtctttctttttggtggaaattttgagtgacattcctttaggtttggaaagtacacagactgtttttattatctgcaatagcacacagggattttgtacttcttcttacctaatatcttcctttttctttcttcccctccctctcttcctctttccctcctctgtctgttttagggatcaaatcttgggtctcaagcttgctagacaaatactctgccactgttgtatcctcatcctccccactttggctagggcttcaaattcactagaggtagccttgaactcctgatcctcctgtaccttccaagggctgggatcataggcattaaccacagtaccaggcccttcatccttgattttttttcctatttttaactttgctatttactggagtgtctgtgtgtatgcatgtgcatgccattgccagcagacaccagaggatggtgttggattcctccagctaagcaagctaatttttgtgctgcataaaatcctgtttcaacattttgtttatggacttaatgtttttggaaatatacttcatactggcaactttgattattctagcacaccaataacaaaaatactagtagctggcacttctggacacagaacgtgcccagcagtgtcctcatcacagcagccatctaagacaggaattgactggtatcattatgtttggagaacctgagacatagagatttggacgtgagttgatatttataatagaacccacactttagttcttttcaattaaaaatgtttcattagtactagaacatactgctagggtagttaaattgtttttatagtagattagattgtctcctttaataactcctttatgtgcatcgttcacttctattcctttcccatcaggacagttctcattcttagcttccttttagacatgattccctttccttgggtgtcataggctgtgcccagaccacagtgtcacacagcctttggaaccttccttcctacttcactagtgtttctcctttgacctcctcagttatcagtgtgagtggcgcagcacagcctactgtgcgcttgtccttcctgcgccccctgctctgcagctccgtcacacgtcccacaccactgtggccaggacatggttttcagggtctttttgtcccacttatgtgcatccgaagttcactgtgaggaagaactggtacttggtttcattatttccaacatcaacatatagtaatagtcaaaacattcttatttattgaagtgaaaatgaatacgtttatttcttgaaatgccattttgatcttaaatgttcccatttaaaagatatgaaaaagtggttaaattataaatttaagtggagtgttaacttcagttcatccaaaatttgtggagtatctatgacatgcctattactattcaaaccactacctggattagtaaacaattcagaaatatctccttatttagcttaatgttagacagaatagtttggtgaacaactctcacagtatgtagtttagatgatgaaagtcatggtgaaagaatagaagaaaaagaaggtgctgaaataagactattgctcccttactaatgtaaccagtaaggctcattgggagggacatttaaacaaggctttgaaggcagacaggcagggctggaggactcaatggtaaagagcacgtgctgctcttccagaggaccctgacacctttgacatacatacacacataattaaagtaggacaggcagatttgggcaaagaattcactgctaagagtaaggacaaaggcctatccaaagtaaagagcaaatgggaacagtctctggatggctttgacaagagaggagcaagtctgagaaataattaggacctgttacacagaaccgaagaactttggcttttctctgagcaacatggaaaatcactgaaaggttctgagtatatcagagatgagctagataacatttagcctattaaaatgcttaaattaaaccttgtttagagtaatgcttgtaagagtgtgtcatctttagagtggtgggaaatggcagaaatcaccttttctctgttggtgttttccactgctctgtggatccaaatgttgtttgaaccctgtttttacattgacaatatatagaattgtctctacttttcaagtagtgggacaaggcatcgaaaagttcattttagctccgttgaggaaaataggtgagaattaaacccatgcttcctgattcttagtcctggaactgagtttgtattaggtgatttaaaaaaaaaaaaaaaaagcatgtttgttgtcttatcaaaaccacattaaactgtgtactaagtgaggctttacgtttgtactgctatgttacaaataacggaaagttttcatttaaaatggtatgggtctactcaaacctaactttggtactgttcctggtactttgtaacatttacccacttttgctagtttgcccaatagataacctctagggatgcctcagatgggcaataccccaaccactcttggcttagaaaacgcccactcacaattctgttctgacagagaatgtgggatctaggtttaaatcagtgtgcccagagcagcctgcacttttgacagagatagaaaggaagtgataagctctttactaccactttaaaattttaatccttttaatggtgtgaaattacagtgtgatttctgaattatggaatttaccataaagctttgtaattgatttgtactttccagcttcctaaattaatagttgcacagtgggtgatagtttatatgctatgtcgtagctggcaaacttctttctgtttgataagattccatctgatcctcaaagtatatttctttattgtttcccttttgaacaacttaattaaattgtaaaatatttctcttttagggcttttgcttcaggcattctaaaatgtagaaatagctagtttgtaactatctcaacaaagagagctgggcatagggactatcccaccctgcctgctgtcttgtcattagagtttgtatatggcattttaggatcttcttcctgcacacatgttccattgtggacagtctgcaaacacttgactagagaagctcaaagccatgaaaaaagaaaaatacaaatctgagaaactgttacagccaaaggatcctaaagtcataaataaatctattgctatgtctcgggtcaatgcttacaacagaaaaagcaagtggggaagtcaggcccggagctacagaaaacagagctgagtacactgtgggcttcattcataattatgtatcagtactggttcctgaatctttacaaacataactgaagaatgtaagatgctaatggggaaagtgcctgctcggtacatggaaataccttctcagtttttctttaaacctaagattatttcaaataatgtctaatgtaaattatatctcatcatttttagaaacttagaattatgtggaattttaaatatctgtaacaaaaataattcactgctagttaaactacaatttataagaaacattttctagcttttgtgtctaaggctgatcttttcatgtgtacatttgtccaatcttgtcagaaatgtcactctaaaatactagtatgtgtttctctttgtaagtcaaacttagccatgaaaaaaatgctagaaaaataagtctgacttcttttcttcctctgtacttttcagaacacatatcttatagatactcaaatgtgttttcattttcttctggttactaaaaagactactcaaactttgtgttcataactttaagttacaggaaactgttttgaggatccatcagttagttacacacaaggttagtgtgatttgtttttagatgtttcaaatgagtcacctcaaagtcatggagaggttaccacttaccacatcttctgttctgattaactttttttcttgggactgcgttgtaaatcagtagtaacttattaaagttagtggttgttttcaatgtttcagtattacttcacttattagccagggtgctccctgtccttgggactgcgttggaaatcagtaataacttattaaagttagtgcttgttctctgtttcagcaccatttggctcagggtgcaacctgtcaactgtcttgcagtcatctagtgcagttccaatgcataaggcctttggctgtaatagacgaattgaaaataaccaattagaacaaaacagtcctcactctgctgtaagttaatattgtggcctctctgaccgttgaacctaatttcataatatagccataaaatgttatttaacctttaaaatagttaagagatagctttttgaaagtattctgtagaaacaaagtagttttgaaggcgagagagcttggctctgcctttgtgtgctacaatctcttctttggtagtttttttctctgtgtctgtaacataaaaaatactttaaaaatgtaagctctacacttgcatctaagactaagcaacctgtgttgtgtcatgaccctgctaataccacagaccttctgtaatactactcccagagagaacccacatcctatgtataaccttagatttattttgaaatctttatgaagagaacatgggggagattactaattgtttctgttatttcctttagggttgtatatttatttataacaagtgtttttaattttagccaacaggactaaaataacaaggtctattaagtaattatttcaaattctagaagtaatatataatttttttctttttttaaaattagatatttttttatttacatttcaaatgctatcccctttcctagtttcccttctgaaaacccactatcccttcctctctccccctgctcaccaacccacccactcctgctttctggccctgtcagttccctatactgggacatataactttcacaggaccaaggtcctcttcctataaaaatttaaaaaccatgttttaggtgaaaattttgcttgtatgtcaggtatctgaagaaaactcaggaaggggagagccagtggactcagtagccagcacatatatgtaatctggaaagcaaacgtcagagtggccagcacatcgtgcactgtagaatgcatgctgacatgatgctagtaaactgctgcaagtgtgcacactgaagacctcattctcctttgagacatggtcttgtatagcccaggctggctttggattcaaaatccttatgtcttggcttgagtgctgaattcaggcatgtgccaccatggctatctctgaacatttgtaaacctattttattaatcactgcttacattttctttctattttagatttattttgtgttctttttgattttttgtttactttattgcatgtgggtgtgaatgtgggtatgtgtacaccacagtatgctgcacatagagaacatggagcaactttgtggactcattacttccctcttttagcgcaaagtcaggctttcctacttttatttgctgagccatcttgccagccttcttgatgcatagctataaaattactttgaacaaaatgtttttattttgttttgatggtgtgtatttatgcatatatataatatatattttagtgttagaaattgtaccaagttatgattttttaaaagatttgttgctatgagtacactgtagcggtcttcagacaccccagaggagggcctgtacatataaaaaaggggtatggtacatgtggggacagtcatttccagcatagcgacagctccagggtggtgatgtgatacttagacatctttttttttttttaagatttttttttaaaaagaattatttattttatgtgtgtgagtacatttcttcagacacaccagtagagggtgtcagatctcattacagatggttgtgagccaccatgtggttgctgggaattgaactcaggacctttggaagagcagtcagtgctcttaactgctgagccatctccaaccccaagttacgatgtttttaacaattgataatctttcccatcaatagaatagttagtctttggtattctctggattcatacatatcttttagaaagaataaatagttacaagacattaaatggaaaagagcaaatttgaaacagtattttactatttagtgtgttaaaagtatattattggggccggtgagatggctcagtgggtaagggcacccatctgctcttctgaaggtccagagttcaaatcccagcaaccacatggtggctcacaaccatctgtaacgagatctgactccctcttctggtgtgtctgaagacagctacagtgtacttacatgtaataaataaataaatcttaaaaaaaagaagactgtatgtttaaaaaaaaagtatattattatggctgtgtttcatgagcagttatgttaaatatatgcatatgcacttaatacatttaaaagcatgcacatggtggaggctggagaactggctcagcagtttgagcacttcttgctcttccaatggagtttggttcccagcacctgtattgggcagttcatcatacctggaagtaactacaactcaatccagaaggtaccagcacacgtgttgcatatgcaaataggaacataaaatttaatattaaaatatacacatttgtatgtgtaatgtatatatttacatagttacataatatacatatttaaataaatttggatgtaataattcattttaaaaagacaatgtgtttgtctttaaatgaatttgaagtgtttatagtaaacctcactaaaaatgttgcagtattgcctcttaggcaaatagaaagccagatgatacagaaggagtagagcctactccttctttttactgtatatgaaccacctgattgctgtaactgttaaatattaatacatttaagttctttaaggtaaccattgctagaaagaaaacaagaattataacttccaaatgaaagtaaaagtaacaaagtgtctgttaccagcaaagcccctagcatctcggaagtccttgtctgcttggctccacctgcttctctggtgcaggttagccatgtttgcctccacaagcaaggttcagccatacctgccttcgtttttctctgctgtgtttgtttatttattgagaaagtatctcactggatagcctcggctgtcctggaactcactgtgtagaacaggctggcttcaaactcagagatccaccagcctctgcctcccaagtgctgggattaacggtgtctgtcctcatgcccacacatgcccagctgttttcattttatatgaaggctgttgctcttgctgttcctcgtatttgaaagtctttgttgtgtgatatttctcatgactcttttttactatttagatttcagcctagagtctccagcgactcagagtttccccaaacctgtattgagcagtctgctcctcccctagttagtttcagctcctcatgatgcttgagtttgtgctaggatgtgctgtggcctatgtgtgggtcagaagacaatttcaggagtcagtgtccccctttgagctctgaggattgagaccagtgtagcagcatggcagcacctttacccgctgagccagtttaaggctcagtattgaattctacaggctcttctcagggtttgagtgattaactggtgcccagcatggtgaccacacctttactaccagcactcagagagcagggcccacagatctctgaggttgttaagcccaatgtgttctaccctgtctcaaaaacagacaaatcaaccaaccaacaaacaatcctcagctgtgtaagttagaactcgatgccatttagttctgaatgcctattacatgccaagtccccccgcctcctaaatggtatcttggatgtgcaatcaaatggctataattcaggagttagggataagaaaatgtccagtttgtaccaacctaagttacatagctaacatctgtctctaagtcatactttgtatatagctcagtctagtaggattacagacatgtaccacatacctagcttccaaacgagccttttgataatgcattgtatttagtttactctggcttctctctatttttgaaaaagtgatttttaatttaaaacagtgttttatttggagttttattagacttcggagtgctgttttaactgaataattcatagccttaaaagttaaattaaaaatgtagaggggttattgtagataaaacaaggttaaaaagtagtaaagtaccagatagaagtacaaattttgggttgattctagacagtaaataaagcatttttagcccttttgggggagtttgagtaaaaacgagtttgatggtatcagggattgctaatttagagatttgtaatatatgtaggtcaagttataaagaacagtttcttgtcctcagacaatgcatgatgaagttgtagtagtaaatgtcataatatctgctttttctgtccagtgggttacaaaaatctctgtgcataatatataggtggagaaataagggaaacaattgagataaaatgcttactgcatagagctaaagggcatagagagactgtggtgcttctgtcggtttgagaatgttgaaaagtaagaagggcggggaagttcaggcagatggaaatggatgactaggtgctgggtcatttgcctcctggtcttttgaggtttttgttacctggactcttgcatctgatagatcatttaggagctaatgggtcaaaaattttaaaaactttgttgtctttgtagaatattttaaaacctgtaggttgaaacagggctttttaaaatcagctatcttcctgtctaaggaagtgcccttcctgtggcaagatagggtaagttataaccaacactgaaacagataaagaaacaaacaagaatggcctttcaggcatacccattgcagtttatcttaagaactggtctggctaaacttgtagatcccagcaagcgtgaggtgcctgtcttccttctcttgtgtcccagcgttttgagttagtcgtgttagctgcatttttccagccacttctcacagcagctagatgccatcactctcctgcgtttacttcactgtgacatgcaaacattgtcccttacaacattttcctaagtttctggcttgatgaagcacactcagttttcagtttggaatggtgtgttggagggcgacagatgtaagtaagcatactcgtgaatagaacatctgctctctgcctggacctgatacacagctgcacacccttgtttcctcacttccagtgacccatcagagtgtgacacatccttagcacattctgtctcttcctcatgcttcctctgattagagcttcctgtgattacgggataaaataagtaagtctggctgaaacatcattatcacatcttagtacagtgcccatctaagatgcactagtgtgtgctgtttacttaccgcatctgtccattatgtaagtgagttagaaaattagacaatttccttcatttgttatcatttctctctatagacactgatgcttttctatggccagagaattattttgttgcttaccaaatctttgatttttcttcattttttagaatagttcttaatttttagtcactagattcttatgtctggacttatatcctagatagtttttttagttcctcatacattaacaaattttactatttttagggtggcacacacctttaatcccaacacccaggaggcaaaggcagggggatctctgagtttcaggctatagaactagttccaggccagccacgactacaaaagaaaccctttcaaaagctgggctaactaggaaagagatttgagttcaaaattgagctaacttctgtagagaggatctgagcagctaaaaccaacacggaaaaaactgtgaagtgaaactggcagcggaattgaaggagtaaattaaagaccccgacagccttttctatttgtgttcttaaatgtatctgctctggaaatgtacagactggataaatggataaataagttggtgaatcctggcaatttattgtggtgccagacagtaaaacatttatctcgtcttttatatgtaaagttacactaacatttgtagtgggatattacttgatttggtttttcattggttgagacaggacttaatatgtagcttggatgacgtagaactcagagatctgtttgagcaagcactgcccatctggcaaggattgtgtgagacccttgggaaacaacatatgattatcctgactaaaattagatattttatgtatataattggcatatacttagaatttctaaattaatgtttgaaattatgaattttcaaaggtggttgaagccaggccatttcacacataggtcttcacactgactatttcacaatttctcctggtatagctttcaaagcatactttcaaaccccaatctaagatatttagaattcagaacatgcatgcattttcagtctctatgtttataaaactcccagtgatagtataccaccatctttgacatcactgtttaaaccgtctctagcttagtttatagtattatatcagttactaacaaaaacttgaggaattctagagtattctttttaataagctaacagaaaatcaacttaaattggcttaagtaataaagatttatttacccttataactgagaagtcaagagatagagtgggctgcaggagtctttgatttgaaatcccaattgcagttaaccatggttctgtaggctctgccttcttagtcattttagcctctagaggcgttcctgtggtgctgaggtggccagcagctgagctttgtatctgtgtgctatagtgtctccctcatccacagtcacatgcaattagaagtaaaactctgcttgtcgcagcatagcaatgttcagattggttaattttggagcaatttgggtttcggacttttttttttttaattacgggtacttagcttgtatgatcattaataagctgtataaactaagacgttaacttctttagtgtgtctcagttgttgttatttttaatagattctgaagcttgaacacaggtccttgtgcagtgcaagcactcagcactaagtggctagccccagaatctatttcagagcaggctgttatacatctctgtaacatttgaagaagattctatgatcttcacctgttcccattatgtagtgtaagtgggattggcattatgtcctgacccagaaggttggctgttagagtctagaccagacaagatcatcacgtgtagtttgcagtgattgctcaaatagtgtgattttcaaattttttgatgcaagttttggactatcttcttattctgggcatttgatacaggttggatatctccaatctgaaaatctaaaataaacggttttgaagctggcacagtacaacaaatggaatgttctatgcataacctacaaatctcaatcaatgtaaatgcattaaacattcattgagaagtattttcagcatatgtgaatgagtgtataaggtacttgtgagctgggtgtggtgatttactctgtaatcctagcacttaggaaactgaggcaggagatcacaaacacaaggcatgggcttcaatagtctgcttaacttagcaagaaccatctcaaaagggaaaacaaaagtaggctgggaacataatagctcagtgggagagcactctctcccatataaggccagtgggagagcaccctctcccatgtaaggccatagggagagcaccctctcccatgtaaggccagtgggagagcaccctctcccatgtaaggccatagggagagcaccctctcccatgtaaggccagtggaagagcaccctctcccatgtaaggccatagggagagcaccctctcccatgtaaggccagtgggagagcaccctctcccatgtaaggccatagggagagcaccctctcccatgtaaggccagtgggagagcaccctctcccatgtaaagtcatagggagagcaccctctcccatgtaaggccagtgggagagcaccatctcccatgtaaagtcatagggagaacaccctctcccatgtaaggccagtggcataggagcaaatcaaagtgcaaaaattttaaatacataaataaatttcatgttgtgacttgtgttttgcctcaaagatgtctcattatgtgtatgtaaatatttcaaaaataaatacagaacacttctggttacaaaaattttaaagagggtatagcttaatctctatagcttttcatattaaattcccaggaaaatataataaaagtagcatttactactggaacaagatgtagatttttatttatttctgtgtgtatgtgctggggagctaacccaaggcttcttcccagatggtaaataactgttgtgtcctgagttgtgttaaactcccagctgtctacaaatgtagacagtgaaaacactgtaattaacacacctaagtcactgtccttattctgtaatgttgcattatcagatattcgtctgttattttagccttcttactttttgatgcatttcaaaataagttatattattctttgctcctgaacacttaagcacacatattgttagcaaagtgatttttgaccttttggttaaaagctttatacatacaggatcttcagctttttttgtttttgtttctgtnnnnnnnnnnnnnnnnnnnnnnnnnnnnnnnnnnnnnnnnnnnnnnnnnnnnnnnnnnnnnnnnnnnnnnnnnnnnnnnnnnnnnnnnnnnnnnnnnnnnnnnnnnnnnnnnnnnnnnnnnnnnnnnnnnnnnnnnnnnnnnnnnnnnnnnnnnnnnnnnnnnnnnnnnnnnnnnnnnnnnnnnnnnnnnnnnnnnnnnnnnnnnnnnnnnnnnnnnnnnnnnnnnnnnnnnnnnnnnnnnnnnnnnnnnnnnnnnnnnnnnnnnnnnnnnnnnnnnnnnnnnnagaaatccgcctgcctctgcctcccaagttgctgggattaaaggcgtgccccaccactcttcagtttaaggcttaattcaaatcctgacatagatgctgtcatggtaaagctaatggggtgtgtgtgtgcatctgtgcctgttagaaccactacttcaccctctgaagcttcatttatgatatgacatgaggtgcacgtgcaaggtctccttggtgaattatatagagtgttgatgcactgagcctctttcttcaccaattattttgacttagtaaaccagtgagctggcaatctgttgttatcagctagaccaaaagaaaacctcaagaatgcaagtctctggtaaatttattagtgtagctgacatttcccactttcttatcagaaacaaacatatgacactacttgaaattaggaagccataaaaatacttagaaaaatcttaaacattagataattgaatgaactaactgtttaagaagtgatatgatgttaatgtgtaattcttagaataagtaggtctttaatatattttacattgtgaattctgcttttatactgaaagacttcagtataaaaagcctaaaagacttttagtaaaaagcctaaaagtagtatttaaatgaaagtctgtttgcacaacataaaaaatcaaaattttgtacaaggtcatttatacatttctcattaaatagcatttaggatatttctgactctttgtttccacttttaaagtatcattgatctctccttatgttttttgttgtgagcctagcctttaatggctgagcatctctccagtcctcactgatctctccttaagtggtggattgactccaaatactcgggcagagccctttgacagctgtgtggagtatgctggtgtgctgctggtgtgctgttggtttgctgctgctgtgctgctggtgtgctgctggtgtgctgctggtgtgctgctgctgtgctgttggtgtgctgctgctgtgctgttggtgtgctgctggtgtgctgttggtgtgctgctgctgtgctgctgctgtgctgctgctgtgctgttggtgtgctgctgctgtgctgttgctgtgctgctggtgtgctgctggtgtgctgttggtgtgctgctgctgtgctgctgctgtgctgctgctgtgctgttggtgtgctgctgctgtgctgctgctgtgctgctggtttgctgctgctgtgctgctgctgtgctgctggtgtgctgttggtgtgttgctgctgtgctgttggtgtgctgctggtgtgttgctggtgtgctgttggtgtgctgctgctgtgctgttggtgtgctgctgctgtgctgctgctgtgctgttggtgtgctgctgctgtgctgctgctgtgctgttggtgtgttgctggtgtgctgccggtgtgctgctgctgtgctgttggtaggcgagaaggattctgagataaaagtagagctgcttaattcttttccctggattgaccctgcatgcgttaacagttttactcatttccaagacatctttaaatgtaaatattttacgtaccatattcatttgacttaattaaatatagcatttttttcctggaaatttcttttgtccagagagtacaaattcaatgagcatgtttttattttattttaagtttttattttgttattgtttggttttgtggtactgagaattgaacttaggacttcacgtgtactaggccccactgaggtttgtcttcagtctttggtttttttttgttcatttgttgggagttttgttggttttggggggaagttcacacacattttggatggcttttttttttttttttgttaaaatatttccatctttttaatttaaaagttgttttagatttgcttatttttattttatgagtgtcttgcctgccggtgtgtatgtagaccacatgtttgtgtgctgcctatgatgatcagattccctggaactggagtcacaggtggttgtaagccacaatgtgagtgttaagaactgaacctcagtcctctgcaagaaaaagcgctcttagccagcgagtcatgcctgtatccctccatctttttactgggatgcttcagatatcctcgttttcatcagtgctgtctgtcctcaaaaaaaaaatcaaccgcgctagcaagttaattttagccaaacccactttcaaacatctttgggcttagttgttttaaacagactgactgatgcctgtctcgcctgaatagtttctccattgcaagtgtcccccttaggagagagtggataaaattagtggataatttaaggttcccgctccttttccagcctctcaaacctaaggtctttctgtggttgttgccttcttccccacagtctaagagcttatcttgggttaatcatcttaaatttgtgttgaacttaatgtcagcttgtaccttcctagtgagtttatgtcttatttaatcaggattataaacatgacaggatatgagaattacacacacgcacagcagaaggttgcagaagacatccagtgagtgactgttatcaaattagtctcctgtggatggacagtggcctactccagagcagtggcatcatcttctcctcctcagagcgcaccctctgctcttcacagcctgcgctcattgaggtctccctttcttactttgctgttcttgttttgtgcctttgaaattcttaaaaaatggaacaatgattagccactgttcaaagtaaggctgtcctcttttggtctcaggagtgacttagtactttgagcctgtagataacagcttctaaacaatgaaagcattagtacacggcttcctaattataaacattttggagtattttaaactgttttcactctttaaggagcccattgtctaagagttcacttttcatgatatgagacaactggccagtcttggtggcacatagctttaatcccagctctggggacacaggagcaggcggatcttgactttgaggctatcctcaaagtcaactctaggcacctgggggatctgcagtgagaagaaaggaaaaggcagctcctcccctaatagctgtagccttggaaaaatggacccttctcttcccaggagcaccctttaaagacttattttacttgtttgtaagattcagttgagtgcatgtgcgtctgtgtgggatatgcacatgtgactacagtagcctgaagagtatggagtgtcaggcatgtcagatcccctgggctgacctagcaggccgttgttgacaaggacgctggtggttgaactggtctttttcaagagcagtgcatgctcagaactgctgagccatctcttcagcccctgcagcattttaaaaatcagctatatctaggattctcaatgtatatcctgagcaaatttaacaggagcatcacagttaattatctctttctagagttggagaactttttctgattctgatttcaggtataacttgaactccagttgggtgtttttgattaggcactggcttttatagttggtagaaaaccaactgcctaagaaaacaattatataaatggccttgaaatttgagggtaatattgccatcagaggatctgtttgataattaattttaagactttttcaagggttattttatgtggtctgtggtttgtcaacacccattaggcatgtattagaaatactcagtttaatgcattttgaattcctttccagtaatagaatggatttgttcaaaatttagctaactaaactgctgccctaggtcttaaaatatcttagctcatgatgtaaaagttgtccactgattttcctttgttgtattgtcacaaaacagaaagaagagggcaagctccaaggacagcttaacaggtctgactctaaccagtacattagggaactgaaggaccagatagcagagctgactcatgaggtgagtgataaatgctggtcttcacatatttcttccttccttcctctcttaatgtcacacgttattactgaccttttcatgctaaatgtttctatgaataaataattatcattaagagcaccttagaagattgcctttataagcaaagatttttgtgctcaaatattaagattttgtcttccctaagcctttaataataacttaaaatggtcaatccccaacatgtatcttattttttattgtgatctgaaaatacttggtggttgcccgtgtatattaaacttttccttacacctaactgactagaattggtgggggaagtatcttttccctctggcctccattccccttcacagtgttctcactgagaatgcaaaaaaggatactcgcaagatatcagttaaagggatttcttagtatttgaatgctttttaaacttgcacctagaatctctgacattcagccaatgaaatttgacagaatttgaatagctcttaggctaatttaaattacttaaactaatccctgtgacaggagagaacctgtttattggtcccattctttactattctctcatacatattcagcaatacaggtaaaactgtgtctcttattttgaatcttagtaaagtaatgtttattcacagtaaagacatttgacaggatagcataaacttgatttgctataaagaacaaagaagaaaggagactccttggccactagatgaatctaaacctcaaaggaacaagtgtggacattgccctttcctggcctgacatccttcagttgaaggcagagtgttggtgaaataacttcctgcagggagttagtctaagtgaattcccagtgaagaggaagcaaaactgaaaacaaattggatagagtcacatgtgggtcacttcagttttctttgtcataggaacattcctatcaatattagtataaatattatatgatagtatcaataatatattagtattaattatattagaattatcataaataattaattagtactataatactagtattattatacattgtgatatttgaaggagcagctcttatgtataatctttttaaaaaatttattaggtattttcttcatttacatttccaatgctatcccaaaagtcccccataccctccccctcactcccctacccacccactcccacttcttggccctggcattcccctgtactgaggcatataaagtttgtaagaccaatgggtctctctttccaatgatggccgactaggccatcttctgatacatatgcagctagagacacaagctccggggggtactagttagttcatattgttgttccacctatagggttgcagatccctttagctccttgggtagtttctctagctcctccattgggggccctgtgatccatccaatagctgactgtaagcatccacttctgtgtttgctaggccccggcatagcctcacaagagacagctatatctgggtcctttcagcaaaatcttgctagtgtatgcaatggtgtcagcgttaggaggctgattatgggatggatcccgggtatggcagtctctagatggtccatcctttcgtctcagctccaaatttgtctctgtaattccttccatgggtgttttgttcccaattctaagaaagggcaaagtgtccactttggccttcgttcttcttgagtttcatgtgttttacaaattgtatcttatatcttgggtattctaagtttctgggctaatatccacttatcagtgagtacatatcatgtgagttcttttgtgattgggttacctcactcaggatgatatcctccaggtccatccatttgcctagaaatttcataaattcattctttataatagatgagtagtactccattgtgtaaatgtaccacattttctgtatccattcctctgttgagggacatctgggttctttccagcttctggctattataagtaaggctgctatgaacacagtggggcatgtgaccttgttatatgttagagcatcttttgggtatatgcccaggagtggtatagctgggcccccaggtattactatgtccaattttctgaggaactgtcagactgatttctagagaggttgtaccagcttgcaatcctaccatcaatggaggaaggagtgttcctctttttccacatcctcgccagtatctgctatcacctgagtttttgttcttagccattctgattggtgtgaggtggaatctcagggttgttttgatttgcacttccctgatggctaaggatgttgaacatttctttaggtgcctctcggccatttgaggttcctcagttgagaattctttgtttagctgtgtaccccattgtttaatagggtaatttggtcctcttgagtctaactttttgagttctttgtatatattggatattagccctctattggatgtagtattggtaaagatcgtttctcaatctgcctgttgctattttgtcctattgacagtgtcctttgccttacagttttatgaagtcccatttgtctttagttgatcttagaacctgagtcattggtgttctgttaggaaaatttcccctgtgctgatgtgttcaaggcttttccccactttctcttctattagattcattgtatctggttttatgtagaggttcttgatccactttgacttgagctttgtactaggagataagaatgaatcagtttccgttcttctacttgctgactgccacttgaaccagcaccatttgttgaaaatgcagtcttttttccactgaatggttttggtttctttggtgaccataggtgtgtgggtttaattctgtgtcttcaattctattccattgatctacctgcctctctctgtaccgataccatgccatttttatcactattctttgtagtagagcttgaggtcagggatggtgatacccatagaagttcttttattgttgagaatagtgttcattatcctgggttttttgttatccgaaatgaatttgagaattactctttttatctctgtgaagaattgagttggaattttgatggggattgcattgaatctgtagattgcttttagtaagatggccatttttactatgttaatcttgccgatccataagcatgggagatctttccatcttctgaggtcttctttgatttctttcttcagagacttgaagttcttgtcatatagatctttcacttgcttggttagagtcacaccaagatatattttatattacttgtgactattgtgaagggtgttatttccctaatttctttctcagtccatttatcctttgagtagagaggaaggctactaagttgtttgagttagctttatatccagttactttgctgaagttgtttatcagctgtaggagttctcttgtggaatttttggagtcacttaagcatactgacatatcatctgcaaatagtgatatcttcttcctttttaatttgtatccctttgacctccttttgttttctaattgctctaactagaacttcgagtactatattgaatagattgggagagagtgagcagccttgtctggtccctgcttttttaataagaagttgttttatttgtactgatggctgctaatgaagttaatgataactcttgaattctatgaccattttaatgttttaaattaatatgtaagttataagttgggatttgtttttacagtagaaaaaaactagttttcccaatgtagcagcttctgattaggaaatatacccttaaaataacctacttttcagtgaatcaatgtaccaagcaggggctcacaccagcctcagagcaagcaggcttttttgtgtgtctaaacagtgccctgaacagagtgaacaatcatgtttgtacacctgtgaaagttaccttgagatccttaaatatctactgtggattataaatcttataacatacacacacatatacacatacaattatattgtaccaaatgtaattttttcctcaggtgaaaactcatggtttaataatgtcttatatttaaaagctggttattcctattctttgcctcacttctgctttttccctttgactattatgccagtttttccagacatatcgttaaagcagagagaaggaagatatttggttctcatgaattatttgatttatttgttttttaacagcagttcaggatcgatcgatcgatcgatcgatcgatctatctatctatctatctatctatctatctatctatctatctatgtgaggagggggtttgttttagtttagtttttgttccaagctgtgcatggcttttttctccattgttctagagatgattagagaactcatcttgtgttttaggtttgtctttgacactgatcctgagaccttaaaatgccagctcattttatatattcatccagttagcgaacattaggacctgattttggaacccaacatccatgttatagaaaaacaaaacaaaacaggtgtggttatgtactctgagggtagagacaggtgtgtttctgttgcgtgttggcctccagccaacctccaggttcagagccagatcttctctcaaaggactaaggtagaggtgataaagcaacactgatgtcctcttctggcctctttgcgcgtgtggtaccccacaccccatacacacccctccactctgcgactgcctgtgctgtatacgagaggaggagtagaaaacagccaggggaaggacagcatggcatgtttcaggtagagaggcatgtatgcgagaggattgctagggcaagtgctcacagcagagaccaggaggactacggaagcagtcagagatcagagtgaggccctgagaccaggccaggatggcatggctccttgtttttcctttagatcaaatgtgttagaccaggctggccttgaactagggagacctgcaggcctttgctcctccagtactaggattaaaggcatgcacctccacacctagcaagcaacttaatttttatgttacttttaaaaaataaataatacagtgctagcttttttttgttccccaaaaaataggaacatttgctgagtatcagttaaaggagctttggttaaaaatgaactactggctctcagatttactaaagcgcaaagtttttaactatgactagaggtttttaaggcagtgaatcatgtgcttttcataaacagtatctcacagatgcagttggacacgagataatcagattttctctccccacaaacagaacagctggaaatgtctaccagtgtacgtgtcacagactctgctgttctgctgcctgtctgatttaagttgtggtcagtgtgaggaacctgtgaggtgataagatagcattcatgaggtcatgtggtttgcaagtacccaatcttcactgagcagcctgcacgtctcaagacaaagaggagtaggatgctgacctagccaggggtctgtgctccctggccagggggaggggtgctacgagttttaaagttatgttatcaggagctgcagcgcctgaaaataaatgagcactgcaagtcattcatgggcctccttcaccctcagctcctcagcctccagcactcggttttagtgtagcatgtttttctgtttcaagtgaagctgaaggaggtagccatcacttatttttcttttcgaatgattttttttcattcatgcattaacttgtttatttactttacatcccaatcatttattttttattgtagaaaaaactgcttgtagaaggattatataatgggttagggatttttttatcagttagaaatttttttccaagtacacaattacttatttttagcctgtcagtatctctttttgaatcatacacaagtttgaggccagcctggtctacagagtgagttccaggacagccagggctactcagagaaaccctgtctcaaaaaaccaactaaccaacccaaaaaaaaaaaaaaaaaaaaaaaatatatatatatatatatacacacacacacacacacacatacatacacacacacaaaagctttcagtttcagtataaaaagatgaataattcatttattataagcaagtgaaggatatcagttgggcggtggtggttcacactttaacccagcgctagctcaggagtcagaggcagatggagctctttgagtgtgaggccaactggtcaacatagtgagttctagaatagctagagctacacagagaaactctgtctcgactcccttcccctaaaaaaaaatacttcagtagagtatttgctaaaataatctacaaatggccaataaccacaagaaaaaaaagttcagcatcattaaccatcaaagaaatgcaaatcaaaactacagtaagtttctgttttatactaaccaggaacatataaggatataattaaaattgacaaagatgtggagaaatctgaactctgtacatggtaagtgggaagagaaaatgatacaaatactggaagataatgcttcattttctcaaattgctaaccatacttaccatcttgcctggaagttccacttttgtctttatacccaagaaaaatgaaatgtctacactgagacatgtgcatgaatatttataacaattttttgcagtacccagaaaataaaaccagtccagatatctgtcagctgataagtggagaggtgcagcatgtcatacaatggaaggggctaggtaacagaagaatataatactgatgtgcactgtagcacagaccagagtgtaagaactcagtcacagagggccacacacactcagtgatgccacttacataagaagcacagaataggaagatctgtagagacagccacagattagtggttacctggagttgaggagaaggtggcaggcagccagggcatggatggcagctgagagtatgcagtgtgtgtgtttatttgggtgatgacagtatcctcagattgtgtgtggagatctttgtgcagctctatggccatgagaaaacctgttcaaacatgtgggctgctgtgtctctgtacccctacctgcttttttttcctttattttgagacaaagtttcactatgtaaccaaggctggcctctaatttaaattctccctcccaagttcttggattatagtgtatgtgccagtacatctactgactcaatagccatatttgaaaattgatattatttgccttttgaaaattcccagagttgtatgaatggaacttattaaagtgtttaaaggtactttgtacatagatattatttgtacatcttttgagaatgtattcataactatatcaagtatcttgagtgttctggtaccttgaaaagttcaagacgactgtcactgacctactaaaagagaccatgacaattagcaatgagcagttgtaatgtgtcagactcagacttggatcttgcttttctgttaacattgtttaccatccctcgttcagttttatttgtggctagttaggttgtttgtggctgcctaaacagattagtagaggacttgcaacactgccaggtgactccctagctgtgttagtatgggcaaatttcttgtccctcagttgccttgttggaattagtggtggaaattgaagtcacaccagaaaggcacttcagacaatgccaaggattaatatgtccccgtcaagtcagtagaccataaaagaagtgtatgttaagatgattaagtaactgcaatggcatgacttgctgctctatggttcatgaagctttttcactccttggcgtaaactgagattcttcatagtttattccctgcttctctccttttatctcacaagacctagatccagccacacaaaattcttttagtttctcaacacgtaaagtgctctcaggcctgtctctcaccatgtcacctatacttgaatttctccttgaacacctgcttatccttaaagacccggctcagccttgtccttcagcatcctccctcctggacagtgcccggcttctcctgtggactttttgtgccctggtgtgatactccaacatcagatgcagtctcttctgcctgacacaaggtctctgatggcaggagccttgcttgttttgttctccttcagtttgccagcatctggtgcactgtttgtgggtacacattggcttgatctgattgataaaagcccatcatatagctccagcaattcctgttaacataattcagtccagtcagaagagaaagacttcatgaggtcatcttgctaacagtctgagggtttttttaatgcttcatctaaaggttaaatcaaatgaaatattcatagtgctttgatctagccttaaaagtgcagactgaaacaagtgtgaagtgatttatttcctgtgagtggtcatacatttacatagaacctcatacatgcctaacctcatcgccactgacattacacagctgtctaaatattgctaatggtttcaattgtgtgaagatccatcagctgccaggaagaagaccttcagcagtagtctctctttgcttacccacaggactgtgtagagcttccttagtgtgacagtctgtagatggctccctcccttctactctggacgggatcaggttctccaattccaaactttctgcctttcacatgttggtacacagatcttccctgcttctgaatgtgaattaaccattgttttcagtgtttttaaatgacttacctaatgctgtgcttgcttgcttgcttccttccattgttttcagtgtttttaattccttacctaatgctgtgcttgcttgcttccttccttccttccttccttccttcctttctttctttctttctttctttctttctttctttctttcaagttactagtgtttcagtgaagtgtctcagtattttaacctagacaatttcttaagtattgcatcttaggattttggattttggcatacagtgattaagaagtcccgatctccagatgatcacttttattggtttcctatttgagtattctggaaatcttttggtttgggtgcttgtttctagttttaatctctgttgtgtttataatacagttttttggtttggtttggtttttttgtttgttttgttttgttttgttttttgagacagggtttctctgtatatccctggctgtcctggaactcactctgtagaccaggctagactcaaattcagaaatccacctgcctctgccttccgagtgttgggagtaaaggcatgcgccaccacgcccggcacagttttttaaaagaagctgataattaagaaaaatttggggcctggctgtatgtacgttataatttacaattcctgtgcctaggagatcagggtaatcctcagcttggcaggtgaaaaaaagaaagaaaatatatcatgcaattacctattttcatttgttttcaattctgaaatctggaaaaagctattaaagtattaagtattctatagagaatccaacaaaatagatgtgtagaacttagctgcacgtgtgactgtccatgtgactatcatgcttgatgcccgctttcctatatgaagcataatgtatagctagttattggtgttgagtattgctacacaaatgttattcagcttaaaaagatctgtgctttacagacactgatacacaaaggcaaatgtacagatggagctctgcaatctgatatgactcaaccttggaaacttactgcaactgtttgctgctcacatgactcacttcaatagttcagaccttgtctaggagtgatcaaagttcatttggttaggggtttttttggtatgcggatggctttttccactttgttgtggattgattgtctttcaaaatacccagtgctctttcctcatttttaaatctcagaatgtggaacttgtctggaccatgcaatctctgctcacacatggagaagttagtttaacttgaataatatacatcattatctataaaatgccatataaatgtttttattaatatcttactaattgtgagaattactttgtttagatgtcaaaattggaaaaatgccattcatgtctctttaaaatcaagtaaaaatgaactctagttcttgataagttaatgatattctagaatgtgccgtaaaaaatgcaaacacagagagaacatgttatctcccttgactccgggggcacttgcccaggttaccggattttctcagcacagatttctctgctacttagtattggtctctatctagaagcttcaaaactctgaaattaggtcaattgtttgttttacaaagaaatttagcatactgtggcttagtttctagagtagactgatggtagttctaaaatacttacatgtacttaaaatctctgcagattcttcctattcgaaaattttagtgccaatcttaatgtgaaatagttgtagttgttgctactagcttttggtgtttgagttttcactatcatgcagttagaaactctgctgcttcctgtcaaagcctaactaaattcatcagactatgaacataacagtttcctgttttcttattaactatacagcattttgtgccttattctttgtgcgttatagatctcattaccctcctttgtcagtgccaaattgttggggtttccatgctcacagagaaagcctgagttctgatttctctgtgttagtgcaggactaaggttttattaatttttaaagttgtgataaatgtgtccagtatcttaaatgttgtttatatacattcttcatgttcttacttctactctgtttcttcacgcataacatgatgaagtagtgcacatcaggtaagaagcagcgccctccctcctgccccgctccccgtgtgtttccgtctgtctgattgctgatatttgcatctaacatggaaatgggtggcatgaatgtgctcagggcctgtccaaaattctaccagctttttaacgtagttcacgtcttactgaatcagaatgctaaattattcaaaactgattttaaaatcatccctgtagtccaaggactaaagatagagataaaatatatgtctagtaacaaatgttttgtgcttttctggaaagcttccgtagaatgtaaaactccagcatcagacctgtctatgttctcaaccatggacaaggacctgggttcagaacccaatgactgaatgaataaatgaattcttttgtttttttggttgagatagggtttcattttattgcccaggctggggttacaggtctgtgccactgcacttggctagtaagttggttttgtttgttattttataagttgggttgcatgtaagcagtgctttttttgcttttatcactgtcaaggatcaacttgcgaggcagctctgaatcacatttgagtatgtgggagttttttatatttttattctacatgtatgactgctctgcctgcatatatgtgtgcctgcatatatgtgcatatatgtgtgacattatgtgcatgtcttatggccatggaggccaagagaggatgttggatcccctgaaactgaaattacaaatgattataagctaccatgtgggtgctgagaaccaaacccaggacctctacaagaacagcaagtgttcttaaccactgagccatctctccagccccctctatttcttgagacagggtctctaatggggcatgtctccaccctctccttgtgatagggctgtagctgtgttccaccacatcaacttttaatgcatgctaggacatgagctcagagccttgcacttgtgtaacaagcagtttacctactgacccatctctataggccccagggctgtgctttcagtaaagacacgcaatgtgcctggtgctgtggtacatatttgactctcagcagctgagaagaggagggaggaagaccagcttaagatcatcttcagctgcaggcactagtcagttaaaggaccaggtagtaaacatgaaggcgaaccagaagtgaaatttccaggcagtgctaagggtatgaactcttaccacctttctggctcatagcttaaacatggaagtcaaagttcttaagaatggtgtgacccttgtgctggattttatgcttcttaatgtacatcttaaagaactgaccaggcacctctgagagctgtgtgctcagaagtattgtagtttcttagaatggggggagggtgcagggtgtaggagagaaatttcccatcaggaggattgtttaagcagatcatggtgcatgtctaaaagaggcaccactcaaccatcaaagatggtgagactaagaagtatggaggtgaaccaccaggtgggaagaaggctgtaaggctagtcacatattgaccagtaagcttagacttatctgaaaagattttataaatgttaatatttgtcttaggattataggctgtggaattgctttgttttctagcttgcctttagttgatatgttatttatataataagtttataataaaactaaaggcataatgaaggcagtgttggcagttacctggcagcttctttttatgtagagcatgtcctcacaagaatgaaatgactgtaagtatacatatctgtaggtgtgtagttgtcggtatacatatctgtaggtgtgtagttgttggtatacatatctgtaggtatgtagttgtccatcccctctgttgttttgtcctgctcctcttagatgttgaatttatacctctggtaatatttgactgtttcagttttaagactgaggaataagcacaggttcaagccaggcaggtctcagcaaggggggagtggacacaaactctcaccccaaccaagaaacaacctaacatcgacacccacttgcaaaggaaaaattcattttctccattgggtctattaaccacacttaagggcaggatccatgcctagcagtaaatagccaacacagaagaactcaatggtggttttgtctcacttgctttgtttgggctttctatgtcttactgatcttttgcttgtttattatggtttctgattttgtgtttttatagtgtgtgtgtacatgcatgtgcgagtgtgtgagtatgtgaacgtgtgagcatgtgagtgcatgagcctgtgggtgtgtggtgtgtgtgtgtgggtgtgtttcttatgttttctctctctttctaattctggtttgtttgctttttttgtttgcctgtttgttttctagaggaagaagagatggagctgggtgggtgggaagaggttggggagaggaagccatgatcagaagatactttataaaaaattcaattgaaaaagactgaggagtcaaaaaacaaataggaagttggcttggacatgttaaccctgatcttctttgtacgataatctacctgagactcttctcttggtgtgtctcaagactctataaaaggctccttgacttataatgtgagtcatgattcctttatttccatagcaaatctcccttgttctttctctctcctcacttctccccagcttcttagtgaatctcagaagtacttcaaaggacagtgggaactttaaaacatatatctgatttcacctaggaatttcacaattaaggaatttgtgttgtttagtatcatatgaatacatgtttatatttgttcaggaattaataaaggcagtaagtctccaagtagtttgcttagactatgtgaacttttcaagacacacagagccagatgttgtggttcagcctctgaatctcagtatttggggtggttaaggcaggaaggtcacaagttcaagaccacctgagcaacatagattattctgtaagactagaaacacaaagggaacacattgttggaacagcagtgtttaatttgtgtgtcaggggtcatttagtttgacattaatttccaaactctgcctgtgtccacaaaggagacaactatacaaaacagctagtttaaaaagaatgttcctgccaagcagtggtggctcacgcctttaatcccaacacttgggaagcagaggcaggtggatttctgagtttgaggccagcctggtctactaagtgagttccaggacagccagggctatatagagaaactcttgtcttgaactccaccccccccccccaaaaaaaagaatgctcccagggcccaactgggggaagggatgcattggctcacagcaacctgtgtgtacccactggggtcaagacaaggcaggcactcattgtctggaagataaaagtcctgacactgagtttgttctcacggactcagccccactgcgtttaaacagagatctgccacagagacattcgttttcttgcattctcctgtcactcagggttaagccaaagactccttgtgcattattcctccctcattgttcagtgtcctccctccaatgtcctccatccttgtgtagtagaccagagtcctccctcattgtacagcagaccagtgctctccctcctctcaatatctcagactctcatgagacttacgaggaaaacacagattccaagatttctgtccattacatgggagaggtcttttcccccccaattaactcctgaaagtcacacagatcttcctcatcacaacccagcatgcccactccttagtccaagacataggtaaggtgtggcttcagtcttacaacatcttctcttacctttctttgtttcttcacaaaaccaaaaaattcctctgctttgttctatcagcagctctaaaagagactttagccatcacttgatgctgagaaactgtgtcttcaagccatagataattttctgtccttgcatcatctgataaaggctacagtatgtttattatggttagagcaaagggaaaccacagctttccaaacaattgacaagttgtggttctctgcccctcccctgtaacagcaggaaaaaggaagacacgtgtcccataatatttcctcagaaggatctggggaagaaaagagaaaggaagagattaactgactgaactcagcactcagagctataaatcatgtgttgcaatatggcgaagggatattgcatcagagcatggcggttatagttaagctctggctctcagggcccagcttcttacaccattctgtgttttcgctgaagatgcagtgctgagtctagggtcccttgctgtgccaagggaccgcatgctactttagtttcactgtctctcagtataattttcttctcttgctgtaggacagggacatttctttgtagctgaaggaatgcctgagtcagataattgccttactgaactatgtatcccttgttccagttgttacaagcaagcaaggaattgctaaaacgtcttcacttcttcctggaagtcttgtcaggaaagccgggaggctgctggcaaggttataatggcttttctctcagaaccgttagttttgaaagtgtttgtaacatttcctgtctgtttcacgctgcctttatctcaagatttgaaagatagtgactaggagcttgtcactgagaacagggatagaggttgataggaatgaagaatgtaggaacctgaagtgtgtcttagcatatcttttaatcctcaacataggtgatagctaattaaaaatttttttttcttttctgttcttaattccactttttttaaataggggaaataggcacagtatataggacatcgatttgtgtgtgctagtgagacccccaaccaacttatctacttcaccagttccaagactcaggaattcagtgatttctgattcattttctcattgataactatttataatttataattaaggtggcatgctttggagatgttgtgtgttatagtgaagagtacgttcatacttcctaggcatgcagctaatatttgcagatgagttcataggctgtctgtgatttacctcagaataacccagggataaggatggtataatttataatgcagcccgactgcctgtgatgtgtgcaaatcaggtgatgcgtgtatggagttcatattatctttagcacagtaaagttatagttgaaattaaaactattagccttgaaatctcactaggtttctctcaagtttatttcttaatctagaaatgagaataatacaatctagtaacagggctgttagaatgagtctcgtcccattacctagcatttctataagtaaaaagacgaaggcattgccttccttgaatccgaatccctcctttccctgggtggccatgtgccttggcttgagtacatctgataacctggactttgttctcacagctcagatgcctaaaaggccagcgggacttctccagccgacctcccttttgatggaatccacattgtcagccatctaataggagacgatgaattgttccactcatcggatgaagattttatagatagttccttacaggaaagtgccattggttttcctttgcacagaaaatctggcccaatgtctctgaatcctgctttggcagatggcagtgagagcgaagcagaagacggtatgctgggacctcaggagagtgaccctgaggctccacagaagcagcccccacagagagagtcctactcaactaccgtgtgaccgtcactgtgacagccggagtcttgagggcagcagtgttacaggagaagagctggagccatcccttgtcctgtacatatgtctgtttacagtcttacctgactgtctttgccaaatgctcactgaatttccattgccacagtagactgaagtatgctaattggtaaatggggttctaacagtattactgaatataaatttttcctatttagaaaatactgctatgtctaaatgtgagaattgtttaaaaattgaggactatgggaaattggattctttttaaacaaaactgctcttgtgcaatattttatgctcattgaacaaactgtacatttgtgtttattagtttccaagtcagctgcctgtagacgtgtgaccagcacagagatgtgatttatcctgtgcttggcatgtctgtttcttcactaaaattcagttctgttagtggccattggagactgtcacacaaacaccttttctttgtataatttctaaacacaaagtaattgtctgttctgaaagttttttgttttagtttctaagttttatgtgtattatatttctgtgtgttagtcagaatagtagcaggttagctacagatatattatttgtacatatttataaatctaccacccaacacctcttacttacatgagtagcaaacattgactaggactgccttcagcattccaacagaacttgtgtaaaataacaggttaaaagacaactcaatacagatcagacactactggcttagcagctgtagtaacttgcagattcataactgattgctgtccaaacactactgatgaagccctttactccatctgtaactaataatataagttccacgattaaagaggttatagcacatgctacttcttgctaatctatttaatataatttagcactagaataaagtccaagatgcacacaaatatatctgaaaagaatgttgtgagtattgtattaaatccttcagcttctaaccgacaggtaaagccataaaaaccctttactcagttgtttccttgtgttcagactttttctctagaaagccgagtgcctgttagttgtgaattgagaaaggacactcaacctgtggagaggcggcaggctgctgctgactggatgcctccacactcttttgttagcagcctaggaaaagaagagccatagtgggaaatagaacttagtacatttatggaattacattcttagacagaatgttttatacatgaagaaaaatgttttatgaaatggagtagaagaagcaaaagtagttttcattctatgactgtgtgatgccttatgctgcattgtgggctgggctgtcccagggagactgtgcccaagctactctcttgcttgacagacaagattggaaatgccttctgtgtccagagcacccgctaaattcttgtatttaatttacctgtgatcacaagctagttatttgaggtattaattaaatcttctcaaaaggcctcactaatgagctttttagctccctgctctctggcaatacaataagtcttatttaaatatgtctgcagagactcttctgtagagatggaaattcacgagcatggagtcaagtctctcagtgagagtgggtcctgctctgagagtgacagcactgccagggtcgagtcccttcgggttctcctgtgtggctctgtactcttagttcaggaggttgtcgtagcccagcaaagtgagatgacttgtatctctgttctttatctcgattccacattaggaaacatgaatggggctagcagtacagctcgaaagttagaatgcttacttaaaatgcccatggccctgtgtccaatcccagaaccaccaaaagacaaacaaagacagagaacaacctaatactctttctggtttgaaataggtgtaaaataaccttggtaattagattttaattcattgatgctcttttggtttgtacaggggaaagctagaagcgtttaggtttttgagtcaagtcaggtgcaggggggcatgcctacatcagctactctggaagctgaggcaggaagactgcttgagtacaagaccagcctgggtaatatcaaaaaaatattttttaaaatttacatgcacctgagagaaatataaaatctttatggatatcagggtcctataggatactatgctctgatctgactccatttcactcaaactaatattaagaatctgtttaggactttaaggtgttggactgtggtctaatgatgaatttttacttcatctgatatttttgtgtttttcaaatggtatctattcacaccctaagacttgaaggatgttctaggcagaaaatgagtggatgacagaggacagaaaactttgctgtcttgggatagtgactttccttctcttgtttctgcccaggtgacacactaaaggagagcccagacattaggatccaaaaagcagttcaacaaactttttttttcagtactgggggtggaacccagggccttacacagtgggtaagctctctactgctgtgccacacccagagtctgacttctttaaaatcaatgcataaatttttttatggagaacgaggccaaagagattgttttatcaacttctactctggtttcttgctgtttgaattttttgttttggtttgtttttattttgcttgaccagttgtcagccagtcagcctttgctggttgatggaaacatcatagtccagctaactggccatttatgttgagaacaagagaaaaagccttttccagccctgagcacaatgcagcttgtgaatttccaggcagtgcctttgattgaaaataatgtctactgcttttgaagcatattattcctggcatcataagaagtcatttggttccttatacaccatttgcataatgcactgtaatattcagtttttaaaagttaaggatatcaattatgttttggtaagcttttcatggccagcatggatattgcacaataccaagacatcgatggccaacatttgtagaatccgtaacttaacttactaaagtaatgagttttagcttgaaagttattgctgctctagattagcaaacaatttttaattaatttcttattaattctgaaattaattaaaatttcttattggcaatagggtagatgctatttaacatccaacttttacatctgtgggtctacataccccttccctccagagaagagctgacatggtaatccattggacatgcaaagttacaagcgtatttcattgtcctgcggggttttcttcattgtaacactgtataacctaaaatgtctacttgtgcctttgctttaaataattaaagtttctcattttacaagattttatgtccttagattattaactttaagagtgaggggcaccagaatcctattatggacatttggccacagagaggattggtactgctagggtttctgtccctcagtgggatgtcatgtccacctgctccacgcacagagtgccaagcagtctgcatgcagtttaagttatcgaaggcatcatcagtgaattcagtaatacattcagatctgtgtgatttaggtatcatatggaggctactgcatgttagttcagaactgggtgcactggtggcactcatgaagactcacaagacattttccagaggtatcctccaggctcctctgccttggaactgtttggatgtttgcagtagccacggcctctacccactagatgccagcagcacacaggccttcaatcgaggcagggtatctccaggtatggaggaaggaggaatcatttagtgaagttcttagggaatgggtgctgactgggtacaaacttgtcaaggatccatgagaaaaggacagaacttctccttcctctgtagtgtgaggctcagaggaacagcaaagtcttcctctggatccaagtgtggatgttgatagtgtatagagaaaatgtccaccatagctttgttccctgggtgtttatggccttagatggtttccctgaagaaactgcttctacccagattagctaagcctgttctcttgatccatctgtatatcagagaccctgccttctttatctgtatacaataaccacaccttattcactgtatgcaacaactctgcctctcagctcaattgtgtaatacacatgggagattcctaggtgctggggtttctctatcagagagcctggtccctctggctccagattttctgtttttgcctctttcttcaccccctcaccagtcaggtctatacctggagtcatacaaagggtgtgtcatccagaaactcacaaggagtacagaggatagaagtgactccatggttgagaaatgcttggaaatttagaagcataagaagaaagtcactagagttaaatagaatatagatacttctccaagacacagggaaaattgggatcaatttgcagtagttgggcaaagagggaaaatatgaatgtcgacaggtactgtttcacatccgtcagggtggcagtccaaaaccaaaattagtcctggaggcacagacctgccccacttgtcagggttctgaggcagaaggattccttcacacagaaatttgagacaaacctggataacctcaccaaactgcatcttgaaaaagaagaaagggaaaataaaagtttggcagtggtataggaaaattggggcctgtgagtcactgctaaactactgtgcagagcagttctgtgcttttgaaaacagtttaacaatattactatgcaacccagcagttctagataaatacttgaagcaggactcaggtacttacatcccaacgtccacagcagcaactcctgtccatcaacttctgaatggaggttgggtgtgtgtgatgtatgcctacaagggaactgtatccataaaaagttctgatggattatatagcaagagagggaccttaaaaacatattgtagtgttttcactagtagccaaaaagacccggtccccttagagtagaccttttactaggagatgggatagcccaggaggttaaagttctggaagtgggtaatgctgattgatgcttgtatagccatgaatgtgcctcttggggtagggtgcgaaatgtccccctccccagtcttgatactgttaatgttgtgtcctatgtaaagtgaggccttgctgaagggactttgaggataatggctggtgttctacctagccagaaatctctgcttcctgacccaccaaaatgtgaaggcgtcaccagcacatgcttccactgctgcaggggactgacctctaatggtgagcccacacatactgctttccttgagtagcttctttgggggtatttcggtcacagaaatatgaaagtaataaaggaaggcggcaccaagaagtgaggcggttgctgagatgatgacactgaggcctctgggacttgtttacaggagccatgtaaaggccgctggagctgcaggctgcagtgctgcaagcagagcctggtgggccatggtgggagcacataatacaaaggtgaacaggaaaagttagctaggctcaagaggcttccaaggggagcaagcaatcaggggtggagccagaggccattcatgtgacatgcaagcaaagaagatgaccatattctgccatgtcctggatcagcgaagctggagttaatagctgaattgtatggggaaatttaaaggcacagcattgaggatgtggtgtggcttttgctcacgctgagacagggaggagggagcagacaaatggaaaaagtagttttatcaggaagggaacatgaccccagtagcagacaaggcaactatgggcaaagtgactgcaattgccaaagagacttggcactgggacaatggaattgtgttttggggacaaggtgtcaccagtggaaggtatgagggtacaataatataaacccatttttttaaacttttatttagtgtctgtgaagacagcctcccctctgctccaaaatggccaccgagagagatctgttgcctgcttctgtcacacaggttcttaaaggccactgaaattatggcccacggaggccaggtaccatctcagacttgaaacatgcctggcatcattcacatggtgccactggatttataggcatgtcagttgcaagagtgataggatgatgaaggttgtcttagttcctcagaagaagcagaagcagaagcagggaggtatctagcagggtcaaagatgaagggtgagtttcaatggcgacaccaggatggtgggaagctgcatgcaccaaatgcagcccactggagagagagagagaggcacatgtacttcagggcacaggagcactgtgggtagagagctctccctaagctcttagagcctgcatgatgccaccaggaatccaagatgctacacacagatacaggttcagtatctgttcttcagagtcttgctcttgcttgctttgtttatttatttatttattttatgtatgtgagtgctctatctgtatgtatctacaagccagaagagggcattggatcccattacagatggtcgtgagccaccgtgtggttgctgggaattgaactcaggacctctggaagagcagccagcgctcttaaccactgagccatctctccagcccagcccctgctcttgctttgttaactcttctctctgttttggaaaggaaatgtatacccagcatagtatattggaagtatgtaatttattagcagcagctcacagctaggaagattgtcttaaggtctcggaagtgacttgggattttgaaccctgttgggagttagtactaaaaggacttctaacaaggagtagtggcacacacctgtaatttaagtagaggcaggaggatggctgcaatttcaaggccagcctggtttatgtggtaagtctcaagtcagccaaggctatgtaaggaaaccctgttttgggggtgggggcggggcaagaagcagacactgcagagatctttaaagttgaatgcattttgctttaagaggtgacctttggagaccggtggcagaacattacggttagggtatgaaaatgtacccatggggtcacgtgtttcaacactttgtccccagctggcggtgttgaccatagccatctgccttcactactgtgggcttcttgaatattgagccaaagtgaccccctcctctcttttaagttcatctgacaacaacaaaattaactaacgggatacttaactcaaattattagtttaaaaaattgctaggtgtgttgattgttcatacattcaaatgcaaacaatgtcccacctgtctcaaagatttacacatgctgtgcctctgaatattaatgaacagatacttgaatggttaatcctagcttctaggaaaatgaaatgctaattctattcagttacagaaataattctttcagtgaagtaggaaacccagaattggagtatcagtggcctatgtctgtaatgtgtggtgtttcctgtaaccttgggctcttccacctgtccacttggttcccagaaataacaactctgagactttattattactgaataaacgcctaggccaaaagcctcggatcattccctgactagctcagaacttaatcctcccatcatcccactctaagttctgtcacatggccggttacctggtcctcagtctcacgggaccatcttcttctatgtctggggcaaatctccccaatgcctgactcaaacctagcatcctctctctctgccagaactcccacctccctatttcctccctatttcctaataggccaacagcattttattgacaggtggtgtttccatacaatctaatggtgctaaggccactgcagagatgaaggtaggccagactcttatcactcagttggcacagtagatacagaggcgtggttgtaagattaagtccacagggcatcagagagcgcatctgggttgctagcaggctggggtgtaactcggctggtatagttcttgccgagtgtgttatgaagtcctgggccgcatcctgtggtggtctgaatgagaatgactcccttagcctcctctatctgaatgcgtgcatcaaagttggtggaacttttgggaaggactaggaggtgtggccttgttggaggagatgtgtcactgggggcgggctctgaggtttcaaagccctcgccattcacaagtagctttcttctctctgatgaatactctagggtgctgctgcagcaaggtacctgcctgccctgctgcactgcttcccaccatggtggtcatgcactcaccatctaaaaccatgagcccccaagttaaatgctttcttttataagctgccttggtcttggtgatttgccatggcaaaagaaacgttaactaagatacattcccactgtgtcataaaccaaatgcggattctcagtacttgggaggaggagggtcacaagttcaaggccatcctctgctacacagcaagttcaaggccagcctaggctacaggagagtgtctcaaaaagcagcaaagcacccagcaccttagggtgaaggaccacttctggaatgtatcctcccagttgcaaatgtacactgtctcattcactcctgtgacatactttgtttgtgaatgctaatatcacatagttcgatctttgttgggattttatcttagtccattgtgtactgagagaggagttaggtttagaaagccttcctcagatgtccctcaaagaagctgctacaactgccctcatcccaagttgccaaggatcgctactttttcagagacgccttcattaaggggagaatggaaagatgctggttgacttgaaagatttctctctgatttgttttacaggaagtgcattctgtacacatgagagactccgggtggagaggcattgtggcggttgagatgcacctgggagtgccaactgcccccgcttctaccacagctctgcatagcaggctggagcaagcagccagccaaccattgtgccctagcctcatctcctccagaagaggttatctgggctctgtgtaacctctgctctttggctatggtattccttcttggtgctttctgtggtcaacctccaggtacacttagggcctatcctagacagactgggaagaaagaatgacattcccattgacctctgtttttatttcctggaaatccagaccttgttccagttagtggagcatggggttagaccaaccacactgctaagagttttggcctgtagacatatctggtatagtacttacctagaatgcacagaaaccctgagtttgatccccagcaccaataaactaggcatggtagtgcacatctgtaattccagcacctaggaggtagactaggcagaaggatcagaagttcaggaccatccttggtttcatattgagcttgaggccagcctgggctacgtaagaccctttctctaaaacaacaaatgtgcagatgtgttgagggtcccctggaagagcagctagtgctcttacatgcagagcatgtctccagactctcagctgcttcctgtctgctcctgctggatgcttcatgaagatggagtgaagcagtggtcagcttgtctgtctcagctgttctatgtgcatgtgtgcacctgctggagcttatgtgcaccacaagcacgcaggtgcacacagaagccagagatcactggagcccttggacctggagttgctaatggctgtgaactgcccggtgtgagtgctggggattaaccaggtgctctgcaagagcagccagagttcttaaccactgagccagctcacaagctactgcactgggcctttggggctcatctatgttgtcacacatatccactgctttccccgcataattccagtgtgtgggcatactgaattctgtttacacattcataaatcgacaggtggttgttatcattcctttgctactctaaatgatgttaatgcaattaccatacacattttctaacagggcatagatgtgtccccagtggtagaattaattggtcatgcatagctctgtgtttaacaatgtcaagacatttcaaagctaactcaagtgtcggcagtgcttcacaatcccacaatccccagctctccatcaacgtgggacaccctctacctttgacgtcctgtggcggcttctgagggtgaatttgctctgctctgtggctgttggtgttgaacaaacttccatgtgcttatcagccctttgcgtttcttctttggaaaatgtgtacttagggttttgcccactttgaaatgtgttgtttctattggtttagtttctgtttatctcacttttgatttgatgttttagatgcagctttgcgtagccagcaatgatctcaaattcttgattcccttgcttcctcctcccaaatgctgggattacataaataaagaaatcttttttaaaaagaaagagagagagccatctccttcaagttgtcctccacatacgcttcacatatatttaaaaatactaattaaaaacaaacaaacaaacaaataaaccagtgtgaatttcatcagagtgaaaacttggtagttcaaagaacaaatcaagaaagaggaaaaacctgttactagaataggaaaaatatttgccacatttggacgacaaggaaatctgtatataaaatatataaattattcttacaattcaacaatcagtgacaaccaagtccagcaggtggactttttaaaaaagatttctttatttattttatgtatatgagtacactgtcactgtcttcagacacaccagaagagggcatcagatctcattacagatggttgtgagccaccatgtggttgctgggaattgcacttaggacctctggaagagcagtcagtgctcttaactgctgagccatctctccagcccccctctctttctaatatgtaggtcccagggaccaggctctagctctcagactttgctatcttcgtgttggaattgttttacatttataaggactttgaagcctcatgtcacctgcaccagccccctgatgtctaaaacagctaccatccattaacccatgtgctcatagtaacttagcttcaggtttcattccattttatgttttcctctaacatccttttctatttatgtatgtatgtatgtatgtatgtatgtatgtatgctgtcctacggtctaacctagaacaacgaattgtacttagatgagtatttaaaaaaaaatctcaccatgtagcctaggctagcttccaacttgaaccttcccatctacttccttaatgcttttttgaattcactttttgaacatgttaaaccatttaatacaacaatatcattaccttgaccttatagtttaggaatttaaagaacagggttcgaaaagcttgcctaaagtttagggcaaatgattggtggctttttctcatctttataatgaatgccaaattctggatcttattggtgcagtccattccttttctgaaagatagtcagggcatagctggatgctttcaggtacaagtgactggactctgtaagttaatctgaagtggaaatcacatgcattttgggggttttgacaagagtcatcaagtccctgctatctgctccactcacttcagcaataaatttttgtgtgtgtgtgttatcaaccatattagtgacttttctggccggtgacaaacatctatcaaaagcaacttaaagaggaagcatttatttgggctcacagtttgagggcacagtccacagcaggagctatggtgcaggagtgtgagtcacagtccacccgcatcaggaagtgaggacaggcagtgcttcgctgataaactccttctttaacccaagacccagccgggagaatggtgctgcccacattggcgggacttttcatcctcagcaaattctctctggaaaaactcacctcacagacactctaaaatacagcctggttgacaatattaaccatcacagtccttcttgtttctcattggcttggttttcttttcatattctctctgctgtctctcaggacagccgggatggagacttaggggagggtgtctggttgtcaagggccacgtgcagatacttatctggaaaggtttttatttgacttgttttggaagtgcacacaagacttcctgctccttatgatctctacattctgaaacttcagtgctgttcccgcatagaggactcctcccactaaatcctttcagttaggactgtgataactagggacactgtcttaattacagttactacagccgtgatgaaacaccatgaccaaagatggttggggagggaagggtttattctgcttatatatttctacattatagttcatcactgaagtcaggacaggaactcagggcagaacctggaggcagaagctgatgcagaggccatggaggggtgctgcttactggcttactcctcatggcttgctcagcttactttcttataggacccaggaccatcagcccgggtcctatcacccacaatgggacctcccccatcaatcactaatttatggaaatgccttacacgtttgcctacagcctaatcctatgcagatattttttcttaattgaagtcccctcctctcggatgactttagctcctgtcgagttgatataagactagctagcacagatgccattctatcttttcctcttctctcctcttttccttttcctccttccttgttggccgacaaaggaccctgacatagttccacacactagtgttctaactcttggtactttgtgtcgccacagtatcacagagcccacctggtcagggaaactgcagtgatctgtcagcttgaatgtggcctttatggagaaacttgagtttgtactgtaaaccaccacagttgaggtccaccactgttgtcctgtttatagatgaggaagccaagacttagggaggtaaatccataattcccagcacccaccaggctggcttagggctgtacctttaccatgcttggcgcctctcagttactctgaaattaatcatctttcctggaagaggtgcaacaggttgacgccttcaggaaaatgactcaacagtgtccatagacctcacaagggtctcagccttcattcaatagtggactcacctctggtgataaaccttttaaaaaatgtcttaaaatttattctttgagaatttcatatgtgtatacatgtatattttgatcatatccactctttattccttcctccccagccaactcacacacaaacatatatgcgtgcacacacacacacatacacacacaaacacacaggcacacacacacacacacacacactagtactgtccataaatgtgtgtgagtaaggtcattc

SEQ ID NO: 454 - DNA, 5849 bp, Mus musculus
aaacactccctatgagtcagctgtaaattcaattcaaatccccagtctcctagtctcctcctctcatcatggttaccaccaaaatgactgctgcctttagaaaccctaataggagacaggtggcgacagacaaggtggcagaaaagctgagttctactctctcatgggtgaagaacacagtatcgcatacagtcagtcagatggccagtcaggtggcaagtccatctgcctcactacacactacatcctcatctaccacactgtcaacaccaacacagtcaccatcttccccatcaaagttgagtccagacgacttagaactcctggctaagctggaggaacaaaacagattaatagagacagacagtaagtctttaagatcagtgaatgggtcaagaagaaacagtggttcctctcttgtatcaagttcatcagcctccagcaacctcagccacctggaggaagactcttggattctctggggaagaattgtgaatgaatgggatgatgtacgcaagaagaaagaaaagcaagtgaaggagcttgttcgtaaagggataccccatcacttcagagcaatagtgtggcaacttttatgtaatgcacagagtatgacaattaaggaccagtattcagaactcctgaaaatgacttcaccttgtgaaaaactgatacgaagggacattgctagaacttatccagaacacaacttttttaaggaaaaagatagccttggacaggaggttttatttaatgtaatgaaggcatactccttagtggaccgtgaggttggttactgtcagggcagtgctttcatcgttggattgttgctgatgcagatgccagaagaagaggctttttgtgtatttgttaaattaatgcaagactacagacttcgtgaactatttaagccaagtatggcggaattgggcctttgtatgtaccagtttgaatgtatgatacaggagtatcttccggaactctttgtacattttcaatctcagagttttcatacgtcaatgtatgcatcatcctggttcctgacaatctttcttacaactttcccactaccaattgcgacaaggatatttgacatctttatgtctgagggtttggaaatagtgtttcgagtaggattagcgcttcttcagatgaatcaggcagaattaatgcaacttgacatggaagggatgttacagcactttcagaaggtcattccacatcagtttgatggtggcccagaaaaattaatccagtcagcttaccaagtcaaatacaactcaaaaaaaatgaaaaaacttgaaaaagaatacactacaataaaaactaaagaaatggaagaacaaggtgaaattaaaaggctacgcacagaaaataggcttttaaaacagcgcattgaaacattagaaaaacataaatgcagttccacctacaacgaagatttcgtgctgcagctggagaaggaattggttcaagccagactgagtgaagccgagtctcagtgtgcactgaaggagatgcaggataaagtgttggatatagagaagaagaacaactcatttcctgatgagaataatattgcaaggcttcaggaggaactcatcgctgtgaagctgagggaagccgaagccattatgggtttgaaagaacttcgacagcaagtcagaaccttagaagagcactggcagcgtcacttagctcgaacttctggaagatggaaagacccacccaagaaaaatgctgtgaatgagttacaggatgagctgatgagcattcgccttagagaggcggaaacacaggcagaaataagagagatgaagcaaaggatgatggaaatggagacacagaaccagatcaatagtaaccaacttcgaagagcggagcaagaggtgaacagtctgcaggagaaggtgtgctcgctgtctgtgaagaacaagggcttgcttgcccagttaagtgaggcaaagcgcagacaggcagagattgaatgcaagaacaaggaggaagtcatggctgtgcggctccgggaagctgatagcatcgcggccgtggctgagctgcagcagcacattgctgagcttgaaatccagaaagaagagggcaagctccaaggacagcttaacaggtctgactctaaccagtacattagggaactgaaggaccagatagcagagctgactcatgagctcagatgcctaaaaggccagcgggacttctccagccgacctcccttttgatggaatccacattgtcagccatctaataggagacgatgaattgttccactcatcggatgaagattttatagatagttccttacaggaaagtgccattggttttcctttgcacagaaaatctggcccaatgtctctgaatcctgctttggcagatggcagtgagagcgaagcagaagacggtatgctgggacctcaggagagtgaccctgaggctccacagaagcagcccccacagagagagtcctactcaactaccgtgtgaccgtcactgtgacagccggagtcttgagggcagcagtgttacaggagaagagctggagccatcccttgtcctgtacatatgtctgtttacagtcttacctgactgtctttgccaaatgctcactgaatttccattgccacagtagactgaagtatgctaattggtaaatggggttctaacagtattactgaatataaatttttcctatttagaaaatactgctatgtctaaatgtgagaattgtttaaaaattgaggactatgggaaattggattctttttaaacaaaactgctcttgtgcaatattttatgctcattgaacaaactgtacatttgtgtttattagtttccaagtcagctgcctgtagacgtgtgaccagcacagagatgtgatttatcctgtgcttggcatgtctgtttcttcactaaaattcagttctgttagtggccattggagactgtcacacaaacaccttttctttgtataatttctaaacacaaagtaattgtctgttctgaaagttttttgttttagtttctaagttttatgtgtattatatttctgtgtgttagtcagaatagtagcaggttagctacagatatattatttgtacatatttataaatctaccacccaacacctcttacttacatgagtagcaaacattgactaggactgccttcagcattccaacagaacttgtgtaaaataacaggttaaaagacaactcaatacagatcagacactactggcttagcagctgtagtaacttgcagattcataactgattgctgtccaaacactactgatgaagccctttactccatctgtaactaataatataagttccacgattaaagaggttatagcacatgctacttcttgctaatctatttaatataatttagcactagaataaagtccaagatgcacacaaatatatctgaaaagaatgttgtgagtattgtattaaatccttcagcttctaaccgacaggtaaagccataaaaaccctttactcagttgtttccttgtgttcagactttttctctagaaagccgagtgcctgttagttgtgaattgagaaaggacactcaacctgtggagaggcggcaggctgctgctgactggatgcctccacactcttttgttagcagcctaggaaaagaagagccatagtgggaaatagaacttagtacatttatggaattacattcttagacagaatgttttatacatgaagaaaaatgttttatgaaatggagtagaagaagcaaaagtagttttcattctatgactgtgtgatgccttatgctgcattgtgggctgggctgtcccagggagactgtgcccaagctactctcttgcttgacagacaagattggaaatgccttctgtgtccagagcacccgctaaattcttgtatttaatttacctgtgatcacaagctagttatttgaggtattaattaaatcttctcaaaaggcctcactaatgagctttttagctccctgctctctggcaatacaataagtcttatttaaatatgtctgcagagactcttctgtagagatggaaattcacgagcatggagtcaagtctctcagtgagagtgggtcctgctctgagagtgacagcactgccagggtcgagtcccttcgggttctcctgtgtggctctgtactcttagttcaggaggttgtcgtagcccagcaaagtgagatgacttgtatctctgttctttatctcgattccacattaggaaacatgaatggggctagcagtacagctcgaaagttagaatgcttacttaaaatgcccatggccctgtgtccaatcccagaaccaccaaaagacaaacaaagacagagaacaacctaatactctttctggtttgaaataggtgtaaaataaccttggtaattagattttaattcattgatgctcttttggtttgtacaggggaaagctagaagcgtttaggtttttgagtcaagtcaggtgcaggggggcatgcctacatcagctactctggaagctgaggcaggaagactgcttgagtacaagaccagcctgggtaatatcaaaaaaatattttttaaaatttacatgcacctgagagaaatataaaatctttatggatatcagggtcctataggatactatgctctgatctgactccatttcactcaaactaatattaagaatctgtttaggactttaaggtgttggactgtggtctaatgatgaatttttacttcatctgatatttttgtgtttttcaaatggtatctattcacaccctaagacttgaaggatgttctaggcagaaaatgagtggatgacagaggacagaaaactttgctgtcttgggatagtgactttccttctcttgtttctgcccaggtgacacactaaaggagagcccagacattaggatccaaaaagcagttcaacaaactttttttttcagtactgggggtggaacccagggccttacacagtgggtaagctctctactgctgtgccacacccagagtctgacttctttaaaatcaatgcataaatttttttatggagaacgaggccaaagagattgttttatcaacttctactctggtttcttgctgtttgaattttttgttttggtttgtttttattttgcttgaccagttgtcagccagtcagcctttgctggttgatggaaacatcatagtccagctaactggccatttatgttgagaacaagagaaaaagccttttccagccctgagcacaatgcagcttgtgaatttccaggcagtgcctttgattgaaaataatgtctactgcttttgaagcatattattcctggcatcataagaagtcatttggttccttatacaccatttgcataatgcactgtaatattcagtttttaaaagttaaggatatcaattatgttttggtaagcttttcatggccagcatggatattgcacaataccaagacatcgatggccaacatttgtagaatccgtaacttaacttactaaagtaatgagttttagcttgaaagttattgctgctctagattagcaaacaatttttaattaatttcttattaattctgaaattaattaaaatttcttattggcaatagggtagatgctatttaacatccaacttttacatctgtgggtctacataccccttccctccagagaagagctgacatggtaatccattggacatgcaaagttacaagcgtatttcattgtcctgcggggttttcttcattgtaacactgtataacctaaaatgtctacttgtgcctttgctttaaataattaaagtttctcattttacaag

SEQ ID NO: 455 - protein, 723 aa, Mus musculus
SPPLIMVTTKMTAAFRNPNRRQVATDKVAEKLSSTLSWVKNTVSHTVSQMASQVDSASLHTTSSSTTLSTPTQSPSSPSKLSPDDLELLAKLEEQNRLIETDSKSLRSVNGSRRNSGSSLVSSSSASSNLSHLEEDSWILWGRIVNEWDDVRKKKEKQVKELVRKGIPHHFRAIVWQLLCNAQSMTIKDQYSELLKMTSPCEKLIRRDIARTYPEHNFFKEKDSLGQEVLFNVMKAYSLVDREVGYCQGSAFIVGLLLMQMPEEEAFCVFVKLMQDYRLRELFKPSMAELGLCMYQFECMIQEYLPELFVHFQSQSFHTSMYASSWFLTIFLTTFPLPIATRIFDIFMSEGLEIVFRVGLALLQMNQAELMQLDMEGMLQHFQKVIPHQFDGGPEKLIQSAYQVKYNSKKMKKLEKEYTTIKTKEMEEQGEIKRLRTENRLLKQRIETLEKHKCSSTYNEDFVLQLEKELVQARLSEAESQCALKEMQDKVLDIEKKNNSFPDENNIARLQEELIAVKLREAEAIMGLKELRQQVRTLEEHWQRHLARTSGRWKDPPKKNAVNELQDELMSIRLREAETQAEIREMKQRMMEMQNQINSNQLRRAEQEVNSLQEKVCSLSVKNKGLLAQLSEAKRRQAEIECKNKEEVMAVRLREADSIAAVAELQQHIAELEIQKEEGKLQGQLNRSDSNQYIRELKDQIAELTHELRCLKGQRDFSSRPPF

SEQ ID NO: 456 - DNA, 301477 bp, Homo sapiens
  misc_feature (1)...(301477): n = A,T,C or G
gtctcaaaaaaaaaaaaaaaaaatccagttcctttcactcaccacctccaccctctgaaaaaaattggggaaatatctgaaacaagattgtcaaaatggatggtaatacctagaggttcatcatcatatgagggtttctgaaagtgtggtctctcaaccattagcatcaacattacttgggaacttgctagaagtgcaaatacttggatcccacctaacacctactaaatcagaaactctggggacaggaccctgcaatctgtgttttaacaaactctccaggtgattctgatgcatgccaaagtttgagaaccactgtattatactactctgtctatttttgtgtatgtttgaatatttccataacaatgttttaaaaatagagttgctatatttgttcttggtgaattggtagattttcattatgtagttactctctgttgatttattatttccagttttttagttttttcttaaacctccaaattagaaatgtttattgttatatagatatttgtttaggtttaatacatgcttatctatacctttgctcattagttcatctcctaccttccaactaagtgttttcttcttacctcttttgctgctctggctctaaggccagcagcgttggcatcagctggttaattatgagaaatgcagaattagtatctgattttaataaaatctccaagtgatttgtatgtacattaaagtttgaaaagcactgtcccaaagtattccttttagaaattctcttagtgcagatctcttgtggtaaacagttgttatttatccaaaaaggtccttatttcaccattcttgaatgggcacacaattctacattaacaattatttttatttattttcatttctttctttctttcttttttttttttttgagacagagtctcactctgtcgcccaggctggagtgcaatggtgcaatctcagctcactgcaacctccaccttccaggttcaagtgattcttctgcctcagcttcccaagtagctgggattacaggcgtgcgtgccaccacaccaggctaagttttgtatttttagtagaaacggggtttcgccatgttggtcaggctggtcttgaactcctgacctcaggtgatccacctgccttgacctcccaaactgcagggactacgggagtgagccaccatgcccggcctaacaattactttttctttttcttttttttttttttttgagacggagtcttgctctgtcgcccaggctggagtgcagtggcgcgatctctgctcactgcaaactccgcctcccgggttcgcggccttctcctgcctcagcctcccaagtagctgggaccacaggcgcccaccaccacgccctgctaattttttgtgttttagtagagacggggtttcaccgtgttagccaggatggtctcgatctcctgacctcgtgatctgcccacctcggcctcccaaagtgctaggattacaggtgtgagccactgtgcccggccaataattactttttcttagcatttttaatgatcttactttatcgtcttctagcttgctttatttgctcttaagtctgctattcatttatctcaggctgctgttgagatattttctttgatattcttcagttttattacaatgtttctaactttggatagattcagaatttttcttgtggtataggtgtgggaagatctaagataaaaatgtaaaagaaatagttataatttaaaaaaataggctgggtgcagtggctcatgcgtgtaatcccagtgctttgggaggctgaggcagaagaatttcttgaggccaggagtttcaggccagcctgggcaacatagtgagatcctgtctctacaaataataaataataaataaataaattggccgtgtgcggtgctcacacctgtaattctagtactttgggaggctgaggtgggcgggtcacgaggtcaggagatggagaccatcctggccaacttggtgaaaccctgtcactactaaaaatacaaaaattagctgagtgtggtggctcgcacctgtaatcccagctactcaggaggctgaggcatgacaatcgcttgaacccaaaaggcggaggttgcagtgagctgagatcccgccactgcaccccagcctggcgacagagcaagagagcaagactccatctcaaaaaaaaaaaaaaaaaaaaaaaaaaaaagaatgccgggcgcggtggctcacacctgtaatcccagcactttgggaggccgaggtgggtggatcacctgtggtctggagttcgagaccagcctggccaacatggtgaaaccctgtctctactaaaaatacaaaattagccgggcgtggtggtgtgcgcttgtaatcccagctactctggaggctgaggcaggagaatcgcttagaaactgggaggcagaggttgcagtgagctgaaatcgcaccactgcactccagcctgggcaacagagggagactctatctcaaaataaatatataaaaataaataaatgaaagtttaaaaaaataagtgggtagagtggatggagtcataagtgatcatttataaatgattgtcaatttattggctacatgcaggtgttggtaactcagatctgttgggcattcaggcaaaatgtattaagtgaattacatggtgttcagaattatttctagatgttcagtgtgatgtgaattagacaatgagactcacaaagctacagtttttgctctttatttatttattttttatttatctttttaaaatttttacaatattcttgtcaaggcattaactcttttatacttaattgtacttaggtatacttaattaccaggaaaactttgtggatcatacctaaataagtgttaagtcatttaaagggctgatgtgatgtgatatagacaatagtattctacacaataatttcaggtctacattgattagattttctgtttttgagacaggctctgtcacccaggctcaagtgctgtggcgtgatcctggctcactgcagccttgacatcccaggctcaagcagtcctcccacctcagcctccttagtaggtggtactacaagcatgcaccactatgcccggctgattttttattttttgtagagacagggtctttctatggtgcccaggctggtttcaaattcctgggctcaagtgatcctcccaccttggcatcccaaagtgttgggattacaggtgtgagccatcacacctggtcattttaggtttctttttttttttttaatgagacagaatcttgctcggttgccaggctgcagtgcagtggcgcgatctcggctgagatcacaacttccgcatcccaggttcaagtgattctcctgcctcagcctcctgagtagctaggattacaggtgcacaccaccacgcccggctaattttgtatttttagtagagacagggtttcgccatgttggccaggctggggctacaggcgcatgccaccacacccagctaattttcgtatttttagtagagacagggtttcaccgtgttggccaggatgtcctcgatctcttgacctcgtgatccgcccgcctcggcctcccaaagtgctgggattacatgcgggagccaccgtgcccggctggccattttagttttaataatttttatatttttctaacttaaaaaaggtactaaaatctcttacagctattatttacgaatatagcattcattattgttattgtgattattttgtatgtgtttaatctcatttgcaatataagctcctggaaatcaaagattttgtctatcttattcactactctattctcagtacttgaccttgtcttgcatgaaacagatatcgaataaatatttgttaaatgaatgaatgaatgaatgaaaatactgataccacatttaacaattctacaagtattataggttttaccatctaacaaataaaatagattgtgtagggcagagtcacagccaacctgtcataaaagaaaatgcaaatgaaaaataaacctttgtacgtataggtgctaagattttggggcttttgttaatgtaacataaccagcaaaagctcaatgatacggcatatataatatacacatacagatggaccagcagatgagattccaaagatagttcaataagcattaactacacccacacacttcattccctaacagaaagaatggaattcttgttcactaagatctgcctcaaacattacttactttgttcctctggctactcaagtatttagtcagaactcttttctttcctttttttcccaggctggagtgcagtgatgccatcatagctcactgaaacctctaactcagggcccagggaatcctcctgcctcagcctcctgagtagctgagactacaagtgccaccttgggtaacagtcagactctgtctcagtaaaataaaataaaattagccaccatgctcggctaaatttttatttttagtttttttagagacggggtcttacgttgttgcccaggctagtcaggactcttgattgcatatgacagaaacccaacccaacctttcaacctgctcctccctcccagtctccgtaaatggcaactccatccttaaagttgcccaagccccaaatctcaaagttaaccttgcgttctctcttttatctcatagccagtctgaaggcaaatcatgttggctgaaaatatatccaaacttaatcacttctcatcacttgcactttccaccatagttcaagcaatcatcatctctcaatatcttccaactggtctccaggtttatactgctaccccctagagaatttacttcacagcagccaatgcttttaaacataaaacatgagtcagaaagctgggcacagctgcatgcacctgtaatctcagctacttgggaggttgcagtgtgctttgattgcatctgtaaagagctgctgcactccagcccaggcaatatagcaagactctgcctcttaaaacacaaacacacacacacacacacacacacacacacacaccaccatagaagtcagatgtcactttgcttatccatccaatttagaataaaaaccaaagtcctaaaaaggcctatagggccttctatgtaatctgattctgttttctctgatttcatatcctagtatttgtcttgcttactccattctaaccacaccactggtctccttgttccttgaatatgcccagtgcatttctgcctcaaagcctttgtacttgctgttctctctgtttagaatgctctttcctagatatggcttgcttgcccaccgtcaccttttttttttttcttttttgagaccgagtttcactcttgttgcccagctggagtgcattggcacgatctcagctcactgtaacctccgcctcccaagctcaagccatcctcccatctcagcctcccaagtagttgggattacaggcatgcaccaccacacccagctaatttttgtattttttgtagagactaggttttgccaacttgcccaggctggtcttgaacatcatgagctcaagcgatccacctgccttggcctcccaaagtgctgggattgcaggcgtgagccactgtgcccagcccccaccacctactttgtgaggtcttccctgactgtcctgtttaaaattataataaccaccaggtacagtggctcatgcttgtaatctcagcactttgggaggctgaggcagttggatcacttgagctcaggagttctagaccagcctgggcaacatggtgaaaccctgtctctaccaaacaaacaaacaacaacaacaacaaaaacccaaaaaataaaaaaacccaaacaaatgaaaaataaaagttagctgggcatggtagcatgtgcctgtagtctcagatacttgggggctgagatgggaggattgcttgaatccaggaggttgaggctgcagtgagctctgatctcattccaccttgggcaacacagtcagatcctgtctcaataaaataaaataaatttgtaataacctttcttcatactccctttctccttcactcataccatctcatatcatatatattatatatgtatttattaatgtgttcaacttattttttcgactaagtcaaatcaagattatttttctattttatttttcttttccaagatgatctaaattcccagaaggtatcattttcttttttcatgtatattttgttcatagatatatttttaatgtatattttgtggaaaaatatacataacctgaagtttgctgatttaaccatatttaggtgtataattcggtggcattaagtatatttacaatattgataaccaccatcactacttagttgcaaaactcttttattgccccaccagaaactgtccattaagcactaactcctcattccctgttcccccagaccttagtaatcaccattttactttctctctttatgaatttgactactctagatacctcatataagtggaagaatataatatttgtcctttcacgatggatttatttcacttaccataatgttttcaaggctcattcatgttatagcatgtagcagaacttcattcctctgtatgcctgaataatatatttaattgtatcacattttcttttttttttcttttgagactgagtctagctttgtcacccaggcaggagtgcagtggtgcgatcttggcttactgcaatctccgcctccagggtttaagcgattctcctgcctcagcctcttgagtagctgggattacaggtgcctgccaccacgcctggctaatttttttgtatttttagtagagacagggtttcactgtgttggccaggctggtctcgaactcctgacctcagtgtgtcactttttctttatccatttattttttgatagacatttggattgtttcccccttttggctattgtaaatagtgctgctatgaatattggtgaagaagtatctatttgagctcctgttttaaattctttcagcttggagtggaattactgaatcatatggtaattctatttttaacttgaggaactgccaaactgttttccacagtggctgtatcagtttacattcccaccagcaatgcacaagggtttacatttctccacatctcaccaacatttgtaattttctgcttttttcataacagcgttctagtaagtgtgaagtggtgtatcatttggttttgatttgcttgtccctaatcactaataacgcggtgcatcttttcacgtgctcattgcatatcttctttggagaaatgttcaagttctttgctaccccctaccctttttaaatttgagacagggtctcactctgttgcctaggctagaatgcaatggtgcattcacagtttctatgtaataggaatttagcagcagcttgctgactggttctggcttttggtttttcatgagattcagtctgatgtgagctggtactgaagtaatctgaaggcttgactggggctgaaagatttgcttttgaggtggctcattggcatggctgtcaagttggtcctgaatgttgatgggaggccttagttcttttccttcacagagctgttcacacatggtggctggcttcccctaaagcatgcaatttaagaaaacaaggcaaaaagtgcaataacctagtctcaaaggttataattggtcacttttttttttttttcttgagacagagtctagctctgtcgcccaggctggagttcagtggcgtgacctcggttcactgcaagctccacctcccaggtgcaagcaattatcctgtctcatcctccctagtagctggaactacaggggcacaccactatgcccggctgatttttgtgtttttagtagagatggggtttcaccatattggtcaggctggtctggaactcctgacctcaggtgatccacctgccttggcctcccaaagtcctgggattacaggcatgagccactacacccagccataattggtcacttttgccatattttattggtcacacagacaagccttattcgatgtaggagggattacacatggatacataaatgaataccaggcaaagaggatcactgggggtcaaaagcaaggatcactcagggtcaaatcagaatggctaccacctgtacatatttccagtgcctagaacaatgcctggtacaatatgttaaaaaaaagtttgataagtacatgagtccttccttctttcctttttcccttcctccttctctccttcctttgaaggttatgggggtggtcacagcattaaagaaagattagaacagcaaaggcttaggaaaggcaggattactggaaccggggattttaatatcctcaggatattctccatctcatttagcttctctgagtatagccaggatctccttagagtttcatccttagagctttataatgagagggcacagggcttttacttttccagctctggtttgaaaaaccccagggcaggattctcccaggcataaccccttgaatcaatcagtatgatcagggagttaaggtaatgtgactggctttgtttgagtcaggcatctatacctgttaatggaaaaagatggaagggggtattgacaataaaaatagtacaactcagccatgctaggtactcccctttctctatgttcccaccattatatcttggtacaacagaacatataatgttattgttcatttacttgttcatatgtttgtcttctatactagactacacattcttacactagaatgtgaacacaggtaccacatttttgtagctccaaatgatataggttttgtagtcaagagagactcatggttgcatttttgctttttccttctactaacaatgtgactttggaccaggcatagcttccctgtcttttaaatgggccaaataatagttgtgtcatgtggaagcacataacattatttctgacatgctgtaggagctgaaaatgttagttactgtccttcctcttaggaaagtagctgacatagttgaataattttaatatatttgtgaataaatgaaggagtaaataaattcagcattcttggcgactggcttggggattcacttgtaaatggggataacaataggattatgataaagattaagtgagatgatagatgaaaagcgcttccacagtgcccagctatggtaagtgctttaaaagcataagccatcagcaacttgggggtgttcacctacagtcccagccattcaggaggctgaggcaggagggtcactggagcctaggagttcaaggccagcctgagaaacatagcgagaccctgtctttaaaaaatgaaacaaaatgggagccatcatgagagaggtaatcctttaaaaccaatatatcagatctcctagaaaagaattggagaagtggctttctctctatttaggtacctctcacaagctatatcacttgcttctgtactgcatagtaaactctcaatagcccctgagtaacaaactgcaatatccattaatagaacacaacatagcctgcagaattccaaaacctcaggtaaagaatgagaaaaaaaaaaaaagacaaagaggaaagttctaccaaattaataattttgtctagtgtcagaaaacacctaattatagaagtttctagccaatgcctcagcgtcggcactcaaacacaataacaattgtaacgtcattctgagataagtcatagaaggaaggaaggagggacagaagaaggaagatggaagagggaaggaaggaaggaagggagggaggaaggggagaaaagaaggaaagaaggaatgaaaaaccaaaatcaattagcatacctaagacaaaaaggctttggtttcagcattcctaatcctccacattcccagctccctactacctaacaagtgtataaggtggaactgaaagggtgttaaatgggtggatcccagtggcaatgtctttgttaacactgcctatgagtcagctataaattcaattcaaatccccagtctctctgtcttctctgcttatcatggttaccaacaaaatgactgctgcctttagaaaccctagtgggaaacaggtaaatgtgtaaaacgatgtttgattttatattaaaacttataaaaatgtaattgctgtaacagaaagtaatttgttattgagttaggatttgtatatttcgcttaatcttcaaaacacaggaacagcttgttaacatttcttcagttttattttaagactgttatctcattgtactgcagccattcgagtgatgaacaaaatttatgaagtgttaggtttaattccatacctgcaagaaaggtattttagtaattggctttttgtaattcaacacttgccgcaattctctcctagctgtaattggctgctgtttacgtttctttgaatatacacattcacagaggagacctagcatgtctgtatgggcttcacatttctcatatggagaagaagaaaatgactggttaccatagcatttgttcacaaactctatttggtgacagtgttgatggttgcatggcctctcaatgatttcagaagtgttgcctcccgtcgtgtttgggaacacagttcataataaaagccacataaatttttctgtaaagtatcatgttcctaaaatagtttcctcacctcatcctttttttttttttggtggaggtgggagaaactgctaattaacattagctaatgtttgtacctggctttaattagacaatttcacacgaaatcaaaacacatctcacgtcgcatctatgattgggactcttatttttatttgcttgatgaagagactgaagcttacagaggttaaaagccagactattagcaggtgtcaaaatcaggattcttctaattcagtcttttttatttgtctttttgtttttgcacattggtgttttgtggctttggaaaatagcaattacaatagctattatttttgaatatttgttatacacatggcatatattattccacttaactgtcacttcagtgcttaagtagatattattatctccagtttatgaatgagaagattggagcttgaagagctcaaaggggttgatcacgtttttggcaagaacacttgaaattttaggtcacagtctagtcacttgcatgaatgtagaagttactagttcctagataattggatagtttaagtggagttactacctctagttccaccaaattttctcttgctttaaaacaagtattttgcaaagtcaagaaatgaatgaatttctccttttggtgggtaggctagaaactggcacactattgatgtcccattctggtgactcaatttcgaaagttttttgggctgacagtgttaatgtgtagtatcacatatagaaatgatgtctgagctgtagatccagagagcttgttctttcccatagtcatggcagatctagtctccacctgtgcacaagtatcaagagataaacagaattgtgtgtctcttaataatgttctttcctaagatgatgtcagagtcttctaaagaatgcatacggtggaggtaaagtggtaaagtggtgaggttaaagctattctttccttttttttttttttgagacaggatcttgctctgttgcccagggtgcagtgcagtgcagtggcgtgatgtcagctcactgcaacctccacctcctgggctcaagtgatcttcccaccttagcctccctagttgctgggactacaggtgcacgccaccatgccctgctaagttaaagctattcttataactccagtgcatggaggccatagctttttatttgagtacctttcagattcatattgtagaaagtaatgagcctagtaatgaatagctgtcactatttcattgtgagccttcatttaaaaaaaaaaaccaaaaaaaaaaaccagttttgaacattagtaggagttgaaatggagtgttatgtctcctttttctttaatagtgctaccaataggactttctgatgagtggaaatgttctatatttgtgctgtcagacagtagccactagccacatgtgctattattgagcacttgaactatgtgagtgtgactatgaaactgaacttttaagtttatttatttttgagacagggccccactctggcacacaggctggagtgcaggggtgtgatcttaactcactgcaacctccacctcttgggctcaagtgaccctcccacttcagtctccagaatagctacagttgtgccaacatacctagctaatttttttatttttatttttgtacagatagggtctgactatgttgctcaggctggcctcaaactcttggcctcaagtgatcctcctgtcttggcctcccaaagtgctgggattacaggcatgagccaccatgcctggcttaatttaagtttaaatgtaaatagtcacatgttgctagtatctctagtggttgctgtattggacagtgcaaacctagaatgtaactgagatggtctagttctctaaaaagctcccagggtgagggaggaatattgttcacagtgggtttgacttctctggtgagttccttctttgtaccttgggttgttttttgcctttcagaggactgtctcccttgcatttcctttctgtgaacaatggagctaacatgactgacttaaacacctttggcagtttagagcacggtgttccagggtttaacccttgccaagtttagaggggttcccctcccagacagtgacccaaatcaatgctaaggctgtacagtatcagaacatagaaaactttgaattgctcactgaatttaccgcaaataaaactatctgaaggccaggcgcggtggttcatgcctgtaatctcagcactttgggaggctgaggtgggcggatcacaaggtcaggagattgagaccgtcctggctaacatggtgaaaccccgtttctactaaaaatacaaaaaattagccaggtgtggtggcaggcgcctgtagtcccagctgctcgggaggctgaggcaggagaatggcgtgaacccaggaggcagagcttgcagtgagtcaagatcttgccactgcactccagcctgggcgacggagcgagaaaaaaaaaagaagaagaagctgaggcaggaggatggcttgaactcaggagtccaagtccagcctgagcaacatagtgagacccagtcttttaaattaataaaataaaatgaaaccacaaacctcaaacaaacaaaaagacaaaacaggatttcaatcattgtgaagctctcgatctagtagatgagtaatgtatataaaccaaaatattacaatttcagagaagtgctacagggcctaatgtttaaccacttctggcattcaactgactgtgttaaaaactctgccaccactttccaggggtataaattgaggtaagttatttggtatttattaaatttcagcttcttcatatgcaagggggttatgataataatacctaccccatgaggacaatatgaggattaaacgaaatagtgtatgtatacagccttagccaatacccatacatgttgagtgctcaaccaggtgttagctattagattttaaaattttatttaatttttatggggttttttttgttgttgttgttgctgttgagacagagtcttgctctgttgcccaggctggagagcagtggcgcgatctcggctcactgcaagctccacctcttgggttcaagcagttctcctgcctcagcctcccgagcagctgggactacaggcacacaccaccacgcccagctaatttctgtatttttagtagagatggggtttcaccatgttggccaggttggtcttgaactcccgaccttgtgatccaccacctcggcctcccaaagtgctgggattacaggcatgagccatcatgtcctgcctagttttttttttgttttgttttgttttgttttgtttttgagatggagtctctcactctgtcacctaggctggagtgcaatggtgcaatctcggctcactgcaacctccgccccccgggttcaagtgattctcctgtctcagtctcccgagtagctgagattacaggcacacgccaccatgcccggctaattttttttttgtatttcagtagagatggggtttcactgtgttgtccaggctggtcttgaactcttccgctcgggcaatccacccaccttggcctcccaaagtgctaggattacaggtgtgagccactacgcccggccactattttttatagtttttaaggtaaaatttacattcactgaaatgttacctgcatattttttgataagtgaatatacctatgtaactcacatccctatcaagatagagaccatttttaccacccagaaatttcactcatgtaccatcccagtcaatcccctgccacagggaaccactgttatgattttttttcaccacagattaattttcttttctagaatttcaaataaatggaacagtatgacactcttttgtgtcatttatttatcttcacatagataattcacatactttgtgtcatttatcttcacatagataattcacatactttaagataaaaaaggtacaattttaaaccttttgggcatgcagtaaaaatctccttcccactggtacccaccagtcacccagtcttcctctctctttctctctcttttttttttttttgagacaagatctttctctgtcgcccaggctggagtgcagtggcacgatcatggctcacttcggcctcacccttccaggctcaagcaatcctcctgcctcaggctcccaagtagcaggactacaggtgcctaccaccacacctgtctaaatttttttttgtattttttttttgtaaagatagggttttgccatattgctcaggctagtcttaaactcctgatcttaaatgatccgccggcctcagccttccaaagtgtttagattataggcgtgagccaccgtgcttggctcagtcttcctctcttgaagcaatcaatgttattagttttatgtgggccatcccatgtcttatcattattaattcaggtgcttacaaaaggctctttgagaactgttttaaaggttacccaaagaatcttgtgacaacccagctaaaatgatataaaatcagttttaacataactgaagtttttagattctgattccaaatgtcagatggtgacattttacctttctctgactttatgccaaatttagtttaagttttagcatctataattttcatttactgaacaaatatatatttaacaaatatgaaaatacaaccatgaaacaaacaaaatcaaatcctggacttaaggagctaatagtaaaaaattcaccaatataactacccaattacagtttcatgcgatgtgaaaggagtaagagaccaccatagggaggtcagaagatgcttctcagaggtggatactagagccgttgtcaaaggatgaggactgggagaactttctgggcacagagcaaagcatgagtaaaagctctgttgaggccaggaagccggtaaatagggaataaaagaggctagcgtggctggagcacagacagcagggtggaattggtctgagcagtgagaagaggtggagaggtgggcaaggcacctggccattcagggcttggttagttaggagggttttttctaagagaatgggaaagtgtttaagtggtttaggctgggaagtgacagggtcacactgttattttgaaaaagtcactctgcctgttgtgttgagattagagaggggataaagggaatatgggtaaaccacaagaagactaggtcagtaatccctccacccccactccccaggtgaaggtagcctagactagggtggtgatggaggaaataggagaggacagattcaaggaccatttgtaagggaaaaaccaatagaatttgctgacggatggaatataagaggggagaggtacattatcaaggatgtagcttagttttcttatacaaggattgagttgcaataaaattgttaattgaaatttctttaaataatggcacaacctaaagttatgcaaacatatgcctcagataaaagttcaagttttcaaagtttttagctgggtggagggcatggctttacttcctatttcttggtatttcctaatcttgttgaaaaaaaagtaaggtttttttttttttttttttctgaaatgcttagttcagtggaaacccatctgcgaattctgtcttataaatttaaatttaaaaatagggatactaatttctagacaaataattccggagtttcttgtgctgctaattattataatttttgtccctttttttttttgagacagagtatcgttctgtcgcccaggctggagtgcagtggcgcgatcttggctcactgcaacctccacctccgtggttcaagcaattcccctgcctcagcctccagagtagcttggctgggagtacaggcgcacgccacgacgccgggctatttttttttttttgtatttttagtagagacggggtttcaccatgttggccagattggtctccaactcctgacctcaggcaatccgcccgcctcggcctcccaaagtgttgggattacaggtgtgagccaccgcgcccggctgtcacttctaaacatataatgaaagtaatctgtattgcctttttactttttcttgcctgcttttcctggaccagaaattaataggctgtttccgtcccaaacaaagtactttccttctaagaatgtcttcgttgacgctggagggctgcccggctgaatcttacgtattcgtgcccatgttctgccccctgcagtagtctgcataaacccaatgcgaagacacgtgtaagagtacattacaattacaagtgtcatttacgcgttgattattgtttttgcgagtgccctaaggccacctctgggggagctcggggctgccttccgaagcatgcgcgtcagcaccgcgtgccagggccctgaaagtcaggctccgcgtcggtgcggcagcgcgaggcctgcagtcctaagctcggggtcgcttcgggcccccgagggggtgtgtcttctaccgttttaacatggaaggggcggttccagtggccggggaagtcggcgacttgcaggactgaaggctggtgctttgaaagagaggcggagggcgagagcgatttccccgcctcctctgcactccgtccaatcccttcgccttctccttttctcggccggcccgcccggcccctaacctgctccaacccattctgcggtagaggctgccgggtctctttaaggccctcccgcgcctgcgccttgggctctcctgacgcggccgggccggaccccggaggaaccagctggccagctggcaaggggctggctgcagttccgacagcggcggtgccgggaggggtaggtgagggtcgcgaggcggccctgagcttctgagtgagcgtggtgcttttgggaactcgggacgggcgacccgtggagccaggagcggggccgaggcgctgagacgcggcggcgcggctgccggctggatgggaagttaatgtttacggcgaagtctactcaacgtttccaaggtgaggggcgctgcgccaggccgggcgggccgggaggccgggcgggcggtgagtccgtgttccgctggcgcacagctgggccgaggcgcggcgggcgggggccgccgcaagttttgctgtgggagcggggcgggcgcgcctggccccgccagggcctaagttccctgcactcgcttcctcgcctgtcgccgccgccgccgcccgcagccctccttctcgtgggcgctggggaagaaactcgtcggcgggtctaactgtggcgtcccagggcggtggagggacggagcagcttcgggggcacgtcctcgtaaatcccgtggaggacactgaccctgcaccccaccctcgaggccagaagtcggttccctttggggacctgaggggcgagagcactcgcccccctgacttgcaaagttggcgtctttacttggcctccgggattctgcgcatggcgtgtctccaggctgctgatgggcaagacagatgtgccaggtccagaatgaacttgagaagagtttgtagccattcctgaatcaccttatgactagtggggcaagcctcaaattaacctcaggatttccggtaggttggattgtggtgttggtgtttccactcaaaagagttgctgtgatttccctgtgtctgtctgtctgtctgtctttggggcttcttagatcatctcatttggcatcctttcacccaagagttaaaccaagccttttggaatggtttcctcgctttcctcctatctattgctggtagagctgctttcgaaaagaagtattttcttgaagtggtatcttttctttgggttacagtgttgaataataaactcctttctttgccgaaagaatgaattccagtgcttactgaagttaaagaaaagtgatctgctggtagtttttaatctttgttctgagctgatgtaagtaactttttttgttttaaaattttgttagtagaatttcaccagtgtaccagaagctctttttctttttcttttcttttcttttttttttttttttttgacagggagtctcgctctgtcgccagactggagtgcagtggcgacgttggttcactgcaacctccacctcctgcgtttaagcaattctcctgcctcagccccgcgagtagctgggactacaggcgcgcgccaccactcccagctaatttttgtatttttagtagagatgaggtttcaccatgttggccacgatggtcttgatctcttgacctcgtgttccacccgcctcagcctcccaaagtgttggggttacaggcgtgagccaccgtgcccggccttctttttcttttcttttcttttcttttttttttttttttttttttaaggctgagtctcactctgttgcctaggctggatatattctcctgcctcagcctcccgagtagctgggattacaggcgtacatcaccacgcccggctaatttttttttttttgtatttttagtagaaacggggtttcaccgtgttggtcaggctggtctcgaactcctgacctcaaatgatctgcccgcctcggccttcgaaagtgctgggattacaggcgtgagccagcgcacctggcccaggtggtcttttttctgttctaaaatgataactacgatttccgagaactttgtgtcaaataaatcttagaactaagttattgaagtatagagaaaaagttcacaattctaaatgtgcaggtggtctgggtgcggtggctcacgcatgtgatcctagcattttgggaggcagaggcaggtggatcacttgagcccaggagtttgagaccagccagggcaacgtggcaaaaccccattttctactaaaaatacaaaaattagctgggtgtggttgtgtgcgctggtagtccgagctacccaggaggctgaggtgggaggatcaccaaagccggggaggtcgaagttgcagtgagccttgatcatgccactgcactccagcctgagcggcagagtgagaccgtctttcaaaaaaaacaaaaacaaaaaacatcgcaggtaatgaatttttactaagtgaaccaccaaagatcaagaaataggacattactagattggagtatgtacgtaggagtggcattgttggttttataggtacgtgggtgataaaactctagtattagaaattgttgaacgttttcccaaagtggttctaccaattagcagggaatgttccggttaccccacatccttgctggtgcttgtcagttgaaattttttttgctagtctagtagaggtacagtaatatatcagtgtggtttcattttgcattttcctggtactgaggttgagtatcttttgttgaccatttatatttcctcttgtgaagtgcctgttaagtctttttgcccagttttcgttgatatgcttatttttctctcatttataatgctttattctggatatgagtcctttctaggatatatatgtattgcatttttatttttttcagtctgtattttgccttttcagtcttttaatggtgttttttttcatgcctggagattcttaatttgtgtgtgtgtgtgttttttgtttgtttgttttgtaagatggagtctcactctgttgccaggctagagtgcagtggcgcgatctcggctcactgcaccctcgcctcccgggttcaagcaattctcctgcctcagcctactgagtagctgggactataggtgtgtgccaccatgcccggctaatttttgtatttttagtagagacagggcttcaccatgttggccagggtggtcttgatttcttgacctcatgatccatccacctcggcctcctaaagtgctgggattacaggtgtgagccaccgtgcctggcctttttttttttttttttttttttgagacagaatctcactctgttgcccaggttggagtgcagtggcacgatcacggctcactgcaatcttgatctcccaaggctcaggtattcctcctgccttaacccccaagtagctggaactacagatgagcaccaccatgcccagctaatttttgtatctttagtggaaatggggttttgccatgttgcataggctggtctcgaactcctgggctcaagtcatacacctacaccagcctcagcctcccaaagtgttgtgattacaggcatgaaccactgcacccagcctgagattcttaattttaatgaagtatactttatcaatcttgtcctttatggttactgctttttgtgtcctatttaagaaatcaatgcctaacctgagaatatgaacatatttttctgtgttgtcttatagcaattttattttactttttgcaaaaaaaatttttttttttttcagacagggtctgaagtgcagtggtgcagtctcagaacactgcaacctccgcctcctgtgctcaagcattcctcccacctcagcctcctgagtagctgtgactacgactacaggcatatgccaccatgcctggctaatttttgtatgttttgtagagtcagggtttcaacatattacccaggctggtctcaaactcttgggctcaagcaatctgccctcttcggcttcccaaagtgctgggattacaggtgtgagccactgtacccatcccctactttttgcatttaaggtatataatttagagtaaattcttgatgaatcgcaggggtcaagattcactttttaggccgggcgtggtggctcatgcctgaaatcccagcactttgggaggccgaggcgagcggatcatgaggtcaggagtttgagaccagcctagccaacatggcgaaaccctgtctctactaaaaatacaaaaattagctgggcgtggtggcgggtgcctgtaatcccagctactcaggaggctgaggcaggagaatcgcttgaacctaggaggcagaggttgcagtgagccgagattgtgccattgcactctagcctgggcgacagagtgagactcggtctcaaaaaaaaaaaaaaaaatttacttttttttttctttgagacaaggtctcactgtatcacccaggctggagtgcagtaacatgatctccacctgctttgacctcccaaagtgctgggatttaggcatgacccactgcaccgggccaagattcacttttttctatatagacgtctgtttgatccagcaccatttattgcaaataccatccttgtccatctgcactgtgtggcactttttttcataaattagataacagtatggtcagctaatttatgaaattagtgtgggtctgtttctggatactttgttctatttgtatatttgtcatccttgcactaatatcactgtattaatgtaactttataataagctttgatatgtggtaatataagctctccaactttgagaggtgggcaaagaaagtgggctgtgggcaggggctgcttttcatcaaacacacttctgtttaaccccttggctttcagccttgagccttactttacttttcttgagtctggagtctcacaggtgtattagtctgttctcatgctgctatgaagaatacccaagacggggtaatttataaagaaaagaggtgtaattgacttacagtgccatatggctggggaggcatcaggaaacttacaaccatggtggaaagcacctcttcacaggggaacaggagagcgaatgaatgcccagcaaagggtgaagccccctgtaaaaccatcagatctcgtgagaactcactcactatcacaataacagggtgggggaaattgcccctttgattcatttatctccacctggtcctgcccttgacatgtggggattattaacaatttaaggtgagatttgggtggggacacagagccaaatcgtatcaccaggtcagagtttctagaaaataaatttatgagataggaatggtggcagaggagggaacctagactagagtccaactgtaccttacataaactttaaaccatttactttctctttagccccatgcctctccactgaccctatacctgggaactcctaggctcctagattctgagcctttctgtgattctgtgagttagccaaatcagcttgcttctttttattttttaaattaaaaaaatttttatatcactttatctggcagccttcttctgagccagaataggctcagagagactcctcagcttgtttcttgattgtattcccttttgcaggccagtaggttcagcctcctctactcagtcacttatttctccatctcttcttgtttcatgggtgccatatctgttcttatctctctgagaatgttaaaaatcgttttcttaagcctttcttttttttttttttgagacggagtctcagccacccaggctagagtgcagtggcgtgatctcggctcactgcagccaccatcttccgggtacaagcgattccccgtctcggccctccaagtagctggtattacaggcatctgccatcatgcccagctaatttttgtatttttagtagagccgggttttcaccatgttggccaggctggtcttgaactccttacctcaggtgatccgtccaccttggcctcccaaagtgctaggactacagctgtgaggcactgcacctggcctagaccttcttttccttgcatagtttcttccaagttactttttttcctatttggtatagtcttattagtagaggccctcctcggaagactggtaatccttggttgtctgttcatgattaacagtgggctactgaaagctgatgggaagtcctgaacttgtaagtaggacttaaggacatgttgttttaccctatattctagagtctaaagcagtgattctcagcttcggctgcacattataatcacatggagaattaaaaaaaaaaatccctgctgctaatacgtcagaatctctgagactaggtcccaggtagggatagttaaaaaaattaggtgtggctacatacagtaaaatgcacagaatttaagtgtatagtttgatttttaccatgtaaccgatataagatgtagagcatggcaaaaaattctagaaaattccttcatatccctttcttctgttgtctcactcccagcctagaggtgaccactattctgatttctatctccgaagattagcaccagtattttttaaagctgccaagataattccagtgtgtagccaagattgaaataattgatctgggtggattgtttgaggctgtctccactgtatttatctttccttttgtcccagtcatattttccagagagtatcttccagttttctgcttggagagttgaggtctggttgtcagtatctgggaactcaggaaaagagggttgggtaaggagccaaagaacatttagtatattgggctcacacaatctgtctctgttaggatgcctatgtcttccaccttgtatggtttaccctcttgagaagagaaatctgtcacctgccacattgagggtggggccactcagcagcttggaagaaatctgggattctaactgttcagcattcacttgctcctttcttttagtcccccttccactctttgttctggcagttcctgagccttttgaggaatctatggcataaaccggtttgttcttagttgtcagcattgctggcttagaatttggccatctttggcggggtgcagtggctcacccctgtaatcccagccctttgggaggctgaggcaggcagatcatgaggtcaagagatcgagaccatcctggccaacatggtgaaaccccgtctctactaaaaatacaaaaattagctgtgcgtggtggcgtgcgcctgtagtcccagctactcaggaggctgaggcaggaggattgcttgaacccaggaggtggaggtagcagtgagctgagattgcgccactgcacctccagcctggcgacagagtgacactccgtcacaaaaaaaaaaaaaaaagattttggcatctttgactaggtcagttatccagctgctttccagcttccaaaattttgttgctattgtctcattctccctgtcataatggcttgtgtcctaaaaacagaacaaacaacaataacacaactttctttatccttgttttagtaacgttttgggaggaagcaaaattagatgtgtgtgtgttcaatctgccatctcaccttggaagtccactgtctgctttccattatacagaaacttgttgccacctgtcctccattgttgtctcctccttatggggttataccttttaaatttcttcatagttgtctgaaaagagtgtcaggaggtagaggacctaaatattggtcaagatatcatttctttaggagtctcaaaattctttttagaagtactcgttgtcccaggatcttataatctcaagattggaagtgattttgaagataatccggtttaacgagctatttgataccttctctaaaggaattgtccagcctaaaatgtgagaaacttgtggtaggaggagatgagtgcctggagaaatggattgggctgtagatctctgcaaggggtctggaaatccatgtgtacattaaatgttgcatgaataatagttcttgcatatttgtaatatataataaaatttattaaaaagtcataatgggccgggcgtggtggtggctcacgcctgtaatcccagcactttgggagtctgaggcagctggatcacctgaggtcaggagtttaagaccagcctggccaacatagtgaaaccccatctctactaaaaatacaaaaaattggctgggtgcagtggttcacacctgtaatcccagcactttgggaggccaaggcgggtggatcacgaggtcaggagattgagaccatcttggctaacatggtgaaaccccgtctctactaaaaatacaaaaaattagccaggcgtggtggcgggcgtctgtagtcccagctactcgggaggctgaggcaggagaatggcgtgaacccgggaggcggagcttgcagtgagctgagatcttgccactgcactccagcctgggcgacgagcgagactctgtctcaaaaaaaaaaaaaaaaaagttagctggctatggtggtgtgcacctgtagtcccagctacttggtaggctgaggcaggagaatcacttgaacatgagaggcagaggctgcagtgagtcgagatcataccactgcactccagcttgggtgacagtgagtgaaactccatctcaaaaaaaaaaaaaaaagtcatgatggtgttatcatttcatttagtaatgcttaaatccaatcatggggagaggtagtactcagaattttttattttgaaaaaagcttctagactagaaaaagttatgagctattactaaagattaataaagttgtggagattttagtgtatagttaacataaagtgaatgataaaaccacccattaaagtctctattttaaatatctctaatagctttgttattctttgacattctatatttttattttctttaaaacactaagtcagtagcttcccaaatgttgctctttgagttagaatttttaccatgaagttcatgatgaaatagaaatgttatcaatgtttatacaatttattcacctttaaattatatccatcctttttctgtgttaaaatgccctttttcttatgaagttgtgattctagatagtagatagattttttccttctaatatttggcaaaaaataaaaacctgcgagctctacatattgctcttcaaattaattttttttttttttttttgagatggagtcttgctctgtcgcccaggctggagtgcagtggcgcaattttggctcactgcaacctccgcctcccgggttcacgccattctcctgcctcagcctcccaagtagctgggactacaggcgcccaccaccacgcccggctaatttttgatatttttagtagaatcagggtttcaccgtgttagccaggatggtcttgatctcctgacctcgtgatccacctgcctcggcctcccaaagtgctgggattacaggcgtgagccaccgtgcccggcctcaaattaatttttaacaagttttataaaatacagaagcctgcttctcaactgcacaaaatccccattggccttttctttctaccacaagttagtaacagtcagtcatgtgttgcttaacaatggggatatgttctgagaaatgagttgttagacaatttcactgttgcatgaacatcgtagaatacacttagacaaagctagataatagagcctactatacacacctaggctatatggtatagccttttgctcctaggctacaaacctgtacagtatgttattgtatggaatactgtaggcagttgtaacacagtggtacttgtgtatctaaacagcaaagatacaccaaaagtactatattataatctcatgagaccaccctctttttttttttttttgaaatgcagtctcgctgtgtctcgcaggctggagtgcagtggcgctatctcagctcactgcaacttctgcctcctgggttcaaactattctcctgcctgagcctcccagtagctgggattataggcacacaccactacacatggctaatttctacatttttattagagatggagtttcaccacgttggccaggttggtcttgaactcctgacctcaaatgatccacctgcctcagtctcccaaagtgctgggattacaggcgtgagccactatgctcaggcagggactaccctcttatatgtggtatccattgactgaaatgttcttatgcggtgcatgactgtattttacttttgtgtttgtatataaaattcaagatatcaatcagatgacatggggaatttttactatctctcatggtgttacgatagtccttcctcattggaagaatgtagattgattaattgttgttagaacctgttgattgtgaccccctaagtttgcttgcaaagtgtcatctcatttctcactaggtattgctactagcctggtatgtttattttgcatttttagctgtttccttcaagagagctttctctgcttgtactgtttgcagtttatccttttaagtggccaaaaccaatgtgggtttagtgccttgttcattgttctttgtgctcatccaactcacacagttaaactctctgaaaagtgttccctaaagttagttaaactggctattatctgggtttttgttgttgtttttgctatttagtgtcttgtaagtttgttatcaggactcctcttaagtaactgctagctcctttgttcttgaaagggaccttgatgagagataggaacaaaacttgctttattatggataatgctttttttgtttgttcataggaaagcgtaagcactgagatagaaggaaggatggggattttgtctgagttggtgctcaaatgattatttgctgttgtctttggcctgaatcttttgtatgtcagaaatgaatccagtatgctcataaattatgctagtgactttatcagaacagcgttagcagatactgtataaaagtgtagctttaatgattaattatataatatatttgaatgaaatacatgagaaaggtagaagaaaaatgtaatatcttcaggcataccagaaatcaggatagtttggaaaactgagcataatttgatggtgaaaagaccttgaagtaaattgaaaatgaattttggggataagtcatgaataatgtaatgtctttgaatacagtagtcctcccttatctgcagttttacttaactgtggtcaattacagtctgaaaatattaaatggaaaattccagaaataatttgtaagtttttttttgtttttttttttttggagacagggtcttgctctgttgcccagactgtagtgcagtggggtgatcatggcttactgcaaccttgacctcctgggctcaagcaatcctcccacctcagcctcctgagtagctgggattacaggtatgtgctgccacacctggctaattaaaaaatttttttttctcatagagatggggtcttgttatgttgtccaggctagtctcgaattcctgggcttcagtgatccttctgcctcaggctcccaaagtgttgggattacaggcgtcagccactgcacctgaccaatttaatgagttttgataaagttatacacctatgtgaatcattcctattgtggttgctgtagttaatccccattgttgtgatttttttgttttattttcagagatgaggtcttgccctgtttcccaggctggagtgcagtagtgtgatcatagctcagtgcagccttgagctcctgggctcaagcgatcttcctgcctcagctttctaagtagtggggacaacagggtttgtgccaccgcacttggctaatttttgggggtcttgctctgttgcccagtctggaattgtgatatcttttaccatagattagtttttcttgttcttgaacttcacataagtagaataacagtgtgttttcttttgtgtctgcttcttttggtcaaaataatgtttttgaaattcatccgtgatcttgtacatatcagtagttctttttaatccatgcatattaatacattgtatgaatataatacagtttatttgtcctatctcctatttggctattatgaataaagtagctatgaagtttttttttttttttttgagacagcctgttgctcaggctggagtgcaatggcacgatctcggctcactgcaacctctgcctcctgggttcaagagattctcctggctcagcctcccgagtgctgggattacaggcatgtgccaccacatccggctaattttgcatttttagtagagatggggtttctccatgttggtcaggctggtcttgaactcctgacctcaggtgatctgcccacctcgggctccgaaagtgctgggattacaagtgtgagccgccatgcctggccctttttttttttttttttttaagatggggtttctctcttgtcgcccaggctggagtgcaatggtgcaatctcggctcagtacaacctccacctcccaggttcaagtgattctcctgcctcagcctcccgagtagctgggattacaggtgcctgacaccatgcctagctaatgtttgtatttttagtagagacagggtttcaccatctttggcaggctggtcttgaactcctcctgtcctcaggtgatccacctgcctcgccctcccaaagtgctgggattacaggcatgagctactgcacccagccgctatgaagttttggctgtgagtctttttgtagacatacactttcatttattttggataaatgaatagtggtggaattactgagttgtagggaagatgtatgtttaactttagaagacaatgctaaacaattttccccaagaaattacaggcacccgccaccaagcccggctaatttttggtatttttagtagaatcagggtttcactgtgttagccaggatggtcttgatctcctgacctcgtgatcagcccgccttggcctcccaaagtgctgggattacaggcgtgagccacctcgcctggccagtttctttttatatctgttaaaacttgtagtattatttcttgtatttcttggggaaatttgtaaaattaccattttacattccactctgccatctataaaagatctagttgagtgacaaatcagaattgagttttagaaagattattctggtacagtgggcaggccgggtgtggtggctcacgcctgtaattccagcactttgggaggccgaggtgggcagatcacaaggtcaggagtttgagaccagcctgatcaacatggtgaaaccccgtttctactaaaaataaaaaattagctgggcgtggtggtgtgtgcctgtaatcccagttactcaggagggtgaggcaggagaattgcttgaacccaggaggcggaggttgcagtgagctgagattgcaccattgcactccagcctgggcgacagagcgagactccgtctcaaaaaaaataataaaaagagtattctagtacagtggggtataagacttggaataggtaaaacacacagtaaagtaatacacttgaaaattgatgtattccgggcaggcgtggtggcacatgtctgtaatcccagctacttgggaggctgaggcaggagaattgcttgaaccttgggaggtggagattgtggtgagccgagatcgtgccactgcactccagcctgggtgacagagggagactccgtctcaaaaaaaaaaaaaaaagaaaagaaaattgatatattccttatccaaggaattggtagggaggtagataagcttatggattctagcgctgtaaggacatggaatccttagacttgatatatggggtgaggataaggtagggatcaggtgacccctatgtatctgttataggctgctggatgttggtatgacaatagagtgaacactgtggaggaaaagatttaaagggaaggagtgatgagttccattttgtttgtaagtagtaactgggagtaaaggaagtatgagatatctctgggagtgtgtgtaggaaggatggagtagaattggaatgttggggaccagtaacatttaagaaatgagctgatgaagagtctgcataagaacaaaaggagtagccactataaaaggaaaccaaggaaagtgatttaacagaagttaaaagaatagaactttgaagagggaggaagcggctggaatgttgttagtgtgagtaaaaatacagacttctcgccaggcgctgtggctctctcctgtaatcccagtactttgggaggccgaggtgggtggatcacctgaggtcaggagttcaagactaacctgggcaacatggtgaaaccctgtcactactaaaaatacaaaaattagccgggagtggtgtcaggtgcctgtaatcccagctacttgggaggctgaggcaggagaatcacttgaacccaggaggcggaggttgcagtgaaccgggatcgggccattacattccagtttgggtggcagatcgaaaaaacaaacaaacaaaaaaacccagacttttggaggtttctttttcttttttttgagatggagtcccgctctgtcgcccaggctggagttcagtggcgcgatttcggctcactgcaacctccacctcccgggttcacgccattctcctgcctcagcctcccaagtagctgggactacaggcacctgccaccacgcccggctaatttttggtatttttagtagaatcagggtttcaccgtgttagccaggatggtcttgatctcctgacctcgtgatcagcccgccttggcctcccaaagtgctgggattacaggcgtgagccacctcgcctggccagtttctttttatatctgttaaaacttgtagtattatgttacttgtcccagtagttatactttatggaataaatcctagagaaacgtacacatgtggagaaatgtctttaacatatattaataatagtaaaaaatcggaagcactccaagtatccatcaatagaggattggttaaatcaagtatagtacatttatatttatatgatggaatgctatacagctgatggagtatggtgtctatactgtgttactttcctgtgcggctgtaacaaattagtacaaacttagtgacttaaaacaaatttaatctctcacagttctgaaggtcagagttcaaaatgtttcactgggttaaagtcaagattgtagcagggctggtttcttctggaggctctgggggagaatcttctccagcttctcgagctgcgttccttgtattccttactttgcattccttgtctccatcctccatcttcaaacccagcagcatagcatcttcaaatttttttctgtttgtgccttcacattgttttctctctcataaagacttatgtgattatatcaggcacaacccagataattcaagataacctcccttctcatgatcttttttttgttgttgagatgggagtctcactctgtcacccaggctggagtgcagtggtgccatctcggctcactgcaggctctgcctctcgggttcatgccattctcctgcctcagcctcctgagtagctgggagtacagatgcccaccaccacacccggctaattttttatatattttttttagtagagacgaggtttcaccatgttacccaggatggtcttgatctgaccttgtgatctgcctgcctcggcctcccaaagtgctgggattacaggcgtgagccaccgtgcccagcctacctcaagatctttaacttaatcatagctgcaaagcaccctctgccgtataagataacatagtcacaggttccaggtattgggatgtggagctctttgcctggggcaggtagggtggcagggggcgtgagaggagggagggaattaatcttcgtaccacaaatactgacaaggacagaagatcaaagtactttaagtaaaataaattgtcaaggaaatatgtaaaattttctaattttgtaaaatttaaaacattacatatatacctaaatgtcatatgtattattagaaaagaaatcttgatgaatatataccatattgttaactgtgactgtctttgagagtgagattacagagtacttggacttccattttcttctggatatttgggttcttaacatgtattttctaatcagaaaaatcagaataaaaggagagaatggtactggggcatatgttgcagagagatcaagttaagataaggactgtcaagtgtttacttgatttagcaacaaagaggttcttggtaagtaaccttggttaagtgtggtttcagaaaaatggcagaatagaatttgcaatgaaaaagtgggaggtgagaaaggaaagagtgaaaagctaaacattttttgtagttgcttagctatggggaagggagaatacagtgagacacagggtacttagggggatgtaagattcagcgagattttgtttttgttttgtttttttgagacagggtcttgcccggtcgcccaagctggagtgcggtggtgcgttcatggctcactgcagtcttgatctactgggctcaagcagtcctctcacctcagcctcctgagtagctgggactacaggcatgtgctgccacacccggctactttttgtattttttgtagagatggggcttcatcttgttgcccagactggtcttaaactcctgggatcaagcagtccacctgccttggcctcccaaagtcctgggattacagatgtcagtcagtcaccacacccagccaagatttttaaatatggcagaggagcaggtttaaaaattgagagcagaaactgggaagaagggagcaatcacctgagctctaggagagtccaaagagcataagctctgacggaagtcttctgactttagacagaatacctacttgcctatggcaggtgagaactagaaaggtgtggatgtgttggagttgagtatgtaacactttagattcctttaatattatcagatttaaaaaaacctcttgcagtcctaaatgcttttttggcgtcttctgaaagtcttttattgtgtagctgtgtatctttagtcttgcttatgtactctcattgtattgacttgtcccagaaatgtctgattttttctgtaacctagtatatggagctcagggaattaagaccttagttttctattatagtgcagcattttgaggattttttttttcctgttatatttgaaactaaccattgcataaaaaatttgcttatatgagttctcttttttttttttttgagatagggtcttgctctgttgcccaggttggagtgcagtggtgtgatcttggctcactgcaacctccgcctccgaggttcaagtgattctctttcctcagcttcccaagtagctgggattataggcgtttgccaccatgcctagctaatttttgtatttttagtagagacagtgtttcgccacattggccaggctggtctcgaactcctggcctcgagtgattcacccgccttggcctcccaaggtgctgggattacaggcgtgaaccactgtgctctgccaaaaaatctgcttatttgagtctgtataaatttcctggaatgttacaacagtaaagcattagaattattgcttaattcaaggaaaccaagattcaaagagcttaaataacttgtcagagccatacatcttgttaatagaacatggtgctttacctggtgagatgctgaagacctttaaaaaattattttattgatatttagtatatttgtgccaggattccctgatttttcacatgtatctttttccagttttgattaagagaacattttttccacctcataatttcatcactcttttcttttacgtatatagtagttcccccttatcctcgggagatacattccaagactactagtgatacctgaaactgtggatgggaccaaatcctatgcgtagcatgtatttacctgttcatacctacctatgatagagttttatttataaattaggcacagtaacagagtaaagacaacaattaataattattactagtcaaatattattaagtaaaataaggattacttgagcacaagcactgtcatacagcaacaatagtggatctgataaatgagatgcatactaagtaactaacaggcggatagcatatacagtatggatacactgggcaaagtgatggttcatgtcccaggtggaacagggcagatggcatataatttagaattgatgaattggatttttttttttttttttttttgagagggagtcttgctctgtctcccaggctggagtgcagtggtgtgatatcagctcactgcaacctctgcctccacaggttccagtgattgtcctgcctcagcctcccgagtcgctgggattacaggtgtgtgccaccacgcccagctaatttttgtattttcagtagggacagagtttcaccattttggccaggctgttctcaaactcctgacctcaagtgatccgcctgctttggcctcccaaagtgctgggattataggcttgaatcactgcgcctggccgagaattaatgaattgtttatttctggaattttccatgtaatatttttggaccagcttgatggcaggtagctgaaaccatggagagtgaaacctcagataaggaggaactactgtacctgtgtagttaaagtaactaaaatggctagcattaaaatagagtttttaggcctttgctatgatctaggcactatttacccttttggaggattatattgagatttttattgacattttaggatttttcaaaacagtggtaattcttatttcacattgggcagggaatgatagtgctgttgagcatacttaacatagtgctcgatatattgtgtatactgaaatttaaaattcatataatatatgctatattttaagagttacttgttctgaatttgtatttttaaggactagcatgaaacataaggaaacaggtattttaatacctttgctgctgtcaagaaaaaattgtgtgtggatatcctttttttaaaaaaacaaaatgaaacaaaacaattttgtgtttgtggcgttggaaggttgaggttagggaataggcttagctcctcacttgcgagcttgaacagcttaggtataacaattttaggtgcagcttaaataatcaaatttcagttttccagtgttcttattcaatatattttattaattattattattattattattattattattattttgcagggtcttgctctgtcacccagcctggagtggagtggcatgatcatagctcactgtaaacttgaactcttgggctcaagtaatcccaagtgtcagacttctgacacttggacagactcctgagtagccaggactacaggcacatgccaccatgcctggctagtttttaaaagatttttttgtggatatgagatctcaatatgttacccaggctgatctcgagcttgcagcctgaagcgaccctcccgccttggcttcccaaagtgttaggattacaggcatgaaccaccatgccccgccctttccccccagttttaatacaaaagaatttgtggggaagtcagtaatttggtaatacagcaaagtggttcatgtaataataattccttctctatgaaggaagacaactttaggtttggtagggaatccagcaaaattctgtgttgaaaagaatttgattataaaaagaattgatgcctgggaaataaagtggcatggtgtagtagagcatgggttttgtttcgtgtctttgttgtttataacttttctgggtcttttttttttttaatcagaaaaatatgtgtcttgatatttactgtgtaaagttggtcatgaggagtggaaataatagcatgtagtgcctataacagtacttgctatatgttttggtggtcaatataaatagcagctatattaattttgtgattatgatattaaaggaaggctaaatgcataaagcagccggtcttggtggctcacgcccataatcccagcactttgagaggctgaggtgggaggatcacttgagcctaggagttcaagaccagcctgggcaacatggtgagaccctgtctctattaaaaaaaaaaaaaaaaaaaggaaggaaaaaaaatgcagaaacctcagatgaaattgaagatatatataaggaatgtctggtagcagaattgatttcaattttgttgaattaccaaatggttaagtatattaccaaaattacctatatgacagttttctcatgttaatatggaggattatattgtccgcctcataaaactgatgtatgtgcttaaaaatattaattattctatttgttggatgatttaggttggcctagtagcagaaaaggtcctgggtttgtataattcttttatagattgtgtttaccgaagcatataacattaaataagacataattttttggcatgtaggaaacttatttcggatacacagaccatggtaattttcgttatttgtaacaaataaattgtaatttgttatttatagttttaaggtcattatttcttcataagaaataagtataacctagcaatgactatactggacatattaacttgaaaaatcttttaatactaggtagtagattaaatggctggttaaagtatttcattaattatttttgaatgaagttgcacttgtatagttcaaaaggtttcaaatgccaaataaatcctaattcttcaaggtaattgcatgctgtatcttgtacagttttggatatcttgaaataagtttggtaatcagtatcaccagctgctaactctggttttattgagtctaaggatatggctggtatttttcgttacattggaccagggagaggaagtttaagtgttctgtctcagagtagaaacggaattatggaaagaattcttgccacacctgtggtctactatcattttaaatattcctagattaacaaacattgaaaatgctaaaactgagtaatacttcatttattcacgtgaaatgtcttgatcagataacacaaaaatatcagctgtactcagatgttttgaactgttgcaaaaatgagtgtaggtatgtgtggtaactttgtatgtagcttaagatatttctgagctgtttagctgatttagggggttttatttagctggagagcagtgcatgtggtactatttagtgaagttctctagcagtgaatataaatatgtatttgcagctaaaacacaaactcatactactggagcattaaatataaaaaaattaaccacaaacctgacattttatatttagatttttttttaaacttaagccctgtaaccaacatagattagtttggtgtttctcttacccttcgtaaacttccatttgcctctgatacaggcatgtaattatgatgtggtagccattggatgctttttctctattaattttctctcattttctcttcttttcttcctttctttagaaactgttgcttatagtttatgaagttggaaggtttcctttcatgtaaattttattatttattttttaagagactccctctgtcacctaggctggagtggagtgtcacaatcatagctcactacagcctcaaactcttggcctcaagtgattctcactcctgggcctcctaaagtgctgggattccaggtgtgagccaccatgtccagccccaaatgtttaaattaaattaattaatttagttttaaagacagagtcttgttctttcacccaggccagagtgtagtggcatgatcatagctcattgcagcgtcaaactccagggtgccagtgattctcctgcgtcagcctcccaagtagctgggactacaggcacacaccaccatgcccagctaatttggcctccgaaagcactaggattacaggtgtgagccaccgtgcctgcctcaaaatgttaattttaaaatcaggaaaatttccgatgtttctgttagggtttatagggtttatatttaatataaaaattatcaaaatttttattgatattcttgagacctttaaacatttatattttatatatgtatttatttatttgagacaaagtctcactctgctgcccaggccaagtgcagtggtgtgatcatggctcactgcagtcttgacctcccaggcttaagcagtcctcccacctcatcttctcaagtagctgggaccacaggcatgtgccactacacttggctactttttaatttatttgtagagacaagggcttcctattttgcccaggctggtctcgaactcctggactcaagggattgatcctcctaccttggccttcaaggtgctgggattacaggtgtgagccaccatgcacagccccttttttttatttttacagatttaggggtacaagtgcagttttcactacatggttatattgtgtagtggtgaggtctggacttttagtgtagccatcacctggatagtgtatattgtacccagtaaataacttctccttccttacctgcctcccaccctcccactctgagaccttttaaaaaatactggttttactacatcgatgtagcagaaaaagattaagtatagtctataataggctgttttcagaggagttgggaattttcatgtggtatgttgataatttcatttttcaaatataatttctgccttaatattttagttaatagaatttcttaaataggtaataagattagttttaggcaggcaataaaatcctcagggtcatgacgtattctgatatgctatgttttgacttttatgttctacagttagttttagcttaccttcttagcagtgatttatagttgtcagaacatttagggctgaatgtttagtatcttggctctatcatttattaattagctaagggatcttgggtaagttgtttaacctctataagcttcagtaaaatatatctcagggttatggtgaagattaaataagataatgaatctaaagtcttgtcacagtgcctggctcataataaagcatatagtaaatgatggtggtagcagcagcagtaatgtgtcattgtgtacatgttttgtttcctgaaatttagctgtaaggcaggaaggatcagagagagatagaaatatgttatatgcctacagataatattaacttggagaaacatgccatatagacatctaagaaaagataattgtcgtgttaccattatttcctcttttttccctttttctgtaattcctactcttgtgtttttttatttcttctgaagccagtgctctgtgtatctttgcaacttccatctctctctgatagttgttagcttaaataagtgaaagacataacttgaaattcttctttttggatatgttttaaaacctatattccattttaatatcaagtattttggtaatacttataatatgcaagacattgcatgggcgtttattcccatttacagaattggaacaacaattcttataacctgttaaaagattgaagataggtattacatttgtactagtcttaaatcctactgtaataagatatttgtaccaaccttaaatcttactggaactaagccatttgtgatagcacacatctgtagtccaagctacttgggagactgagccgggagcattactagagcccaggagtttgagaccaacctgggcaatatagcaagacaccatttcttaaaaaaacttactggaactggtgtaaatattatttttaactctccacatattaattcagttgtatatcaggttttttatgggctcagagtttttaactccttgaaaactccttaaagtgggagacataacgatgtatgcagatacaaattaatgaccttttatatttgcattgatacagcattttgaaatttgagcaaacattttaggatgtacttctcagtttgatatattgctatttattttggaggcaaataagaaaagaactgtggatgcatttggcgttacaaatacttagacaaatacccactaaaaaaaaatcgtgctataagtctgcacactctggtttgtaattttgtttaagcaaagttgcagtttaaataatgatccctgagatataattacctgtcattcacctacctgccaatttcccctagtgtatggtttctataaaacttactatgaaacttgaggtacttgtaatagtcaatttgagactaaaaatataaataattaaaaaaatatgacataggtggtagagcttagaggtctgtagaaattacctattcattaattcttttttttttttttttttttgagatggagcctcgctgtgttgcccgggctggagtgcagtggcgctatctcggctcactgcaggctccgcctcccgggttcatgccattctcctgcctcagccttctgagtagctgggactacaggcgcccaccaccacgcccgtttaattttttgtatttttttagtagagatggggtttcaccgtattagccaggatggtctcgatctcctgacttcgtgatctgcccgcctcggcctcccaaagtgctgggattacaggcgtgagccactgcgcccggcctattcattaattctttatgccaccttttttttttttttttttgagacagagtctcagtcttcgcccaggctggagtgctgtggcgcgatcttgcgtcactgcaacctccgcctcctgggttcaagcaattctcctgccttagcgtctcaagaagctgggattacaggtgtgtgccaccacacccagctaatttttttgtatttttagtagagacagagttttaccatgttggccaggctggtctcgaactcctgacctcaagtgatcctcccgcctcagcctcccagtgtgctgggattacaagcatgagccactgtgccccgcttcttttagccaacttttgttgtttagtgtatactagctgctgtgctcgtcattagggagggaagactagtaccctctcttattcagaacaggaaaaaagaaaaaaagatgcttttaggctccaggtcagctcccttctcagctgtgctgctaacctgcaatcctgacctcagtaatgatctcctgatatcttcagcattgtgttgctctctcccttttatttccttactttgtatcttttcagattagaacatatttttcttgtcatgacaaaggactctccaaaaattaatttcccctcatttatgcaaaataatacatatttaacaaaatttggaaaaagaagtataaataatattaaaaatcacaaagttaatgtcttatattgaattttattgtggtaattgcttttggcagtttctgttacttctgttctctttatagtttagccagagcaaactattaaaactcactttggtacttgtatgctcatgtttatagcagcatgattcccaagagtcaaaaggtggaaataacccaaatgttcctcagcatagagatgaatgcatagacaaaatgtatgtgggggggagggtatttgtatatgtatgaatatgaatattatttagccacaaaaaggaatgaggttctgatacatgctacaacatggatgaaccttgaaaacattatgctaagtaaaataagccagacagaaaaggctagttttacatataatcatataagtatgatcccacctatatgatatatatagaataggcaaattcatagagtcagaaagtagattagagtttacccagggatgcaagaaagggaaatggatatagtatttctgttggggatgatgaaaaagttttggaaagaatgctgatggttgcacaagattgtgaatgtattaaatgccatgaatcatacatttaaaaataatgagaatggcaaattttatatgttttactataaacatacttttaaaaaaagtctgtttgaaaccgttaaggacttgtagctagttcacagttttacttctgagtgaggcttaggtgtctctctatatattgttcatgctccatcattttttcaaaaaaagtactgattatgtgagtggtgagtttgttgacaattaaattttcttcttggttttctttttttccataaatatggatcacttataatgaaaacatttacacataagaattacttttttttctttttgagatgggatctcactgttgctcaggctggagtacagcggcatgatctcggctcactgtaacctctgccccctgagctcaagcagttctccctcctcagcctcctaagtatctggaacgtgcgccaccacacccggctaagtttttgtattttcggtagagatggggtttcaccatgttgcccaggctggtctgagctcaagtgatctgcctgcttgggcctcccaaagtgttgggattgcaggcatgagccactgcgcccagctaagaattactttaaaaacaaaattacattagacagtatttgtcttctttaggctgctgtctagtgtctttttttttctatctgctcttgatcatctttcaccttttttttttgatgtgtaggtctcattccttaattataagttttatgtaaccatattggagataattagaaaaaagagaaagaactctctctgaccccaaatttagtattctgacataacctttattttaattttgatgtattttcttcatgtctctgcctatatctttgatctaatttgaatatatgtgtaatttgagttcttttttcactttttgttgtattaacattttgcatgtggtctgcctgattgttgtcttaaccagatttttttttttttttttgtgagacagggtcttgccctgtcacccaggctggagtgcagtggctgaataatggctcactgcagcctctgacctcgtagactcaatcaatagtcctgcctcaggctcctgagtagctgggaccacaggtgtgcgccactatgcccggctaatttttgtattttttgtagagacggggttttgccatgttgcccaagctggtcttgaactcctgggctcgagcaatccacctgctttggccttccagagtgctgggattacaggtatgagccaccgcgcccagccttaaccaactttttaaaacaaaattacaaaaggcttacatgatactaaaaaattttaaatacagaagtcgctaaagtagcaaagttttctttctctgtttttatttcacttgctacattctcactatcttgaggtagctgttaatagtttcatagcctatcaaaatatggtattatattgtatgtatatcctattctttacctatatttgattggctccatcaaattgggaaccatgttatttttaatggctgcatcacattctgttgtatggtagtgtcataatttatttgcttattttctgattgatgaacattgtggttattaccagttttttcttataaataattctgtgattttttttttttttttttttttgaggcagagtctcgctcactcttttgcccaggctggattgtgcagtggctcagtctcggctcactgcaacctctgcctcccgggttcaagtgattcttatgcctcagcctgctgagtagctaggattacaggcgtgcaccaccatgcctggctaatttttgtatctttaatagagacggggttttgtcatgttggccaggctggtctcaaactcctggcctcaagtgatccacccactttggcctcccaaagtgctgggattacaagtgtgagctaccatacttggcctgattttttttttctttttaaaaataagagatctactccagccttaattttagtgcataaatccatatacctatactatttataataggaagttatgtagaatcatctaaattttttttattgtacagattgccacagcataggaattcatgactttaaacttactcaaaatttcttctagagaacaaagataaaactcaaaactgtagaataaaaaaaaaacctcttcaaaaattagtactttacatcataaaagactgtttggcaagcccaagataaacgtttgtttttgacttataagccaatgttaggcccataatctaccataggtcaaatctcaaaacggcaaattggagtctgtccaaattttctgttgtattgaatatttttgaaatatttgaactattagccaggacgtgagcatttttgtcatacacggatttgttgtaactaaatttgacacacgcaccgtcaaagtgtttgtttagtccttgcaggtgttcatggcatattgaaagagatattcagtcttcctggtgctggtacctgaagagttctgatgtcatttggatctctttacttttgaatggaagtttacaaaaagcttacccagagcttcaagtcacagagcagtctgggtcagttattacccttacacataatcacctttcaaagcatgaagtaatacaagggtaatgttcatttgtctgaaagctctggttataagaaacattcagacagggcttaacttctgctactgttgccagtgagggacagcccaataccagtgcgcatgtgcccaaggccctgaacactagtttggaagccaggaggacacatctgtagcttgtaagatgaggcgtgcatagtagataccatctgctaacaacagcttggttgatgtaggatggcgatacagcggtgaggtctatgtgactgtttgacatgctgaggttgctgaaagtgaactggctgtgagggctgggagactgtctagaacacacttagttgtgccatttgaggtcctgcttgtcctctctttgcttctttcacatcattatcatgagcagtcaatagctgttcagtacacggcactaagaaataccaggagtaagcagtaagatgatgtaatgatgtagtcttgtaggccatgttggagaaagacgaagtataatcctcgaagaagccatacatgtagcagctacagaagaaagtgcataatttagaaaggggtaattttgcaacagtacttccaggaaatctgcatatttggctgtgtagtgtttaatcttttccaggcaaatcgttggccagccatcgtgaagatctgttttgtgtactacttcagagagaacaaattcaatgaaatgggcagctgttggaaggcggaggtccattccactgataggtttctaatgataagagttacacatgtagcaaattttgttttgttaatactacattcatattagtcataacacctaggctgttgagctgttccagcttaggcacactatcttctttttcttcagatttacttgctagaagcagatgggaaactgcagctaaatacagctgctagatagagatgtcatagcaatccataaatagttctagtaaatagcaagatgctggtgtagaaagagcgtgacgtgatcgctcacaatggcagtcaagtcagcaaaatactggctgagactcagttgaggggactggcctttgtatgagggcaacttcagctctttgtaccaagtgctcggtgaatattggcagccagctctcctcgccatcactgcttctccagctccctgggaccctgaggtgcatgcagccagacacgacaactacagtcccgccccgaggccctcacagcctcagtccccttggcgtcggccccactggtgctgcagacagttggctgcgaagcaccagtctcagctctggccaagctccccccattgttaaaggactggcaggcggctcccaattctgtgattaatttcagtacgtaggtccttgcttatttgagtattgggacagatttctgagtcagcccatcgacatgtatcatggatacttccaaatagtcgttctaaacagctgtatgaatgaatgtattcagcaataatgtctttaaaaatactaatttcctttagacaaatcattagtttttttgtttttgggttttttggtttgttcgttttgtttttaagacggaatcttgctgtgtcgcccaggctggagtgcagtggtgtgatcttggctcactgcaatatctgcctcctgggttcaagtgattctcctgcttcagcctcctgaatagctgggactacaggtgtgtgccacccacgtccggctaatttttatattttttagtggagacggggtttcaacatgttggccaggctggtcttgaactcctgacctgtagtgatccacccacctcagcctctcaaagtgctaggatttcaggcgtgagccactacagctggcccaaagcatcagttttttataatgaatatttcagatgcaaaaaaaaaaaaaaaaaaaaacctatgttcacatcacccaccttaagaaataaacattataaatgtacttgtaaacataatccccatcttctttaagatataacattatacttatatgtatgtttataaacagtatatcatataaacatgcccttttacattttcattattgcccaactttgtgtgttgaacataatatgtcacatgaggtcattagcctccaggatggctgtcagtggtctccacttccttatatttatgctgttatgcgctttcttcccatgttgaatagggctgacttgtgtaaccaattgaatattacaaaaatatcagagtgacttatgaagctaaatcatgtaagcattttctgtcttgctttcttgttctgggggaagccagttgccacaaggtgaagatactcagcagtcttatggaaaggtccacatggtgagaaactgaggacttttgccaataactatatgagggagccatctttgaagcagctcttccagccccagtcaagccttcagatgacagcagcactagccaagatttctgcaagctcatgagaggccatgagccagaatcgcccagctaaactgtactgcagtttctgacatacagaaactgggagataataaatatttaatgtattaagctactaggtttggtagtaatggatgagagaaagagacttgtaattgtttccatgtttgcctccccatacttcattactagtgagcaatttgaagacaggacaggaaccatatgtcttacttattttcccactcaatgcctagccttatgcctatgtttagtaagtatttgttgagtgaaattgatagtattctggtggaagtaaaaaatttagaagggatattaaatccctaaagctgagatagcctgatgtttgaatcatgagtcattgttggatagcatgtaaagaccacattgtttcttctgaatagtagttaaagtaagcctctcagctactaatgctaccctggctatgggagtatggcattgattttgaagttatggcatgtggcttttactttactattctctggggcttgggttaggatacaatctttcctagatgactttcatttcagacttccttctaggcatattaactgaagctaaattttttcctttttctttttcaaaatatggaagaatgtaaaaaacctaaagtcctgtcagtttaggattttgctggtatatgtagcaagagacagtacttaactatatcctagtggattgtttttatagattatggagagacagtattactacagaggattatatctaattatattcagaaaatatattccaaaattagattccaaaattaggtgtaattttgagtcacacatttggtactttttagttcttgtaacctgtgttgtttaatatggaggcccctagctacatgtgatgagtgagctcttgaactgtgactagtctgaattgagatgtggtgtacatgtaaaattcatactgaatttcggacttaatattaaagaaagaatgtaaaatattacactaataatttcttcatattccttatctattgaaataatgttttgagtatattgggttaaaaaatataatttcatttgttttacttgtttttactttttagaatatagctactagagaatcttaactgatatggcttgcatttgtggcttgccttatatttctattagagagtgcttttctattgattgattgattggttgattgactgtttgattgagatgaagtctcactgtgtagcctaggctagtcttgaactcctgggctcaagtgatcctcctgccttggccttccaaggtgctgagatcacaggcctgagccatgtcgactggatgagagtggtttttaacccatcaaaatattcagttcttcagggcctttgtacattttccttctttttttttttttgcctgactctttgtttatctggcttcttcctgctcatttcatagatcttatcttaaacgttgcctcctcagaaaggcagtccttatccaccctatcaaattaagttctttagtgttttgccctcatgtcatgtatccttctctgcatttatttattcactatttgtctgacttcttaactagctctgtgagggaaaggaccatgtctattttgtttatgacgacacttttagcacccaataaagtgttcttttagaaagtagattctaaataaattcttgttcagtgagtgatactggtattactaagcagtgggctcactgcttgatgctcatagaacccaatactatgacaccggcttttgagaaaagaaaaagggctttattgtgagctgactggcaaggagacaggagtttcagaaagaaaatatggaggaggatgtcataaaagaaattaggaaaacagggctgtgctgcaccgctgcccctcgtcatgctcaggtcgactccccgctccccacaaagaaggaaaagttcccagaactgaacaacctgctgtgcttagcactccgattggtccttttctaaattaaaagggcccattggagtgctaagcacaacaggtgaaaaaaatatctgtattaagacgtttcattaggctgggtgcagtgagtggctcacgcctgtaatcccagcactttgggaggtcgaggcgggcaaatcacttgaggccaggagttcgagaccagcctggccaacatggtgaaaccctgtctctactaaaaatacaaaaagtagccaggcgtggtggcacgtgcctgtaattccaggtactcaggaggctgaggcaggagaattgcttgaacccaagaggcggaggctgtagtgagctgagattgtgccactgtactctagcctgggcaacagagcgagattccgtcattttattgaattttcacaactaaggggctaaggagaagatagagaagttcccagaggtaaaggaaaaatgggttagttaataaaattagagtagttacaggctcttcaacaagaatactggaagcaaaagacaatagagggcaatatcttaagtataagggaaaattattatttttttaagacagggtgtctctctgtcgcccaggcttgagtgcagtggcgtgatcttggctcactgctacctccgccccctgggttcaagcaactctcctgcctcagcctcccaagtagttgtaattattataggcgtgcaccaccatgcccggctaattttttgtgtttttagtagagatggggtttcaccatgttgcctaggctggtttcgaactcctgagccagatgatccacccaccttggcttcccaaagtgctgagattacagacgggagccactgtgcccggttgggaaaattatttgtaatctaagagtttatagtgcagtcattttcaagtgtaacagtagaaaaagcattttcacatatgcagtgtctcaaactcacctctcatgcaacccctttcaggaaggtagtagaggaggtactccaccaaaataagagtgttttgagcaaagggaagacatagtgtttaggaaacaaatgatccaacccaagtgaggtgaaaggaatacctgggatcacagttgtgtaccaggtgtagagcaactagtccagaatggagcaagtcagaaggttgcagaaaggacttgtacaaaaatataagattgatagcacatgtgatatgctcgaatatgttgaggagatttatataattggatgaattgggggtgaatttataagtacaaataaagctaaacaattagacatttattaactccagggaaagtaaaaaattggtccaagaaagtaaaagtaatcacagtatacctcatagaacaactgtgactaaagttacatagtcatgttaatgcatacactgaatattggtgtaaccaaaaatatgttttttatttatttttattttttttgagagggagtcttgttctgtcgctcaggctacagtgcagtggtgcgatcttggctcattgccagctctgcctcccgggttcatgccattctcctgcctcagcctcctgagtagctgggactacaggtgcccgccaccatgcctggctaattttttgtatttttagtagaaacggggttttaccgtgttagccaggatggtctcgatctcctgacctcatgatccgcccgcctcggcctcccaaagtgctgggattacaggcgtgagccaccgcacccggcccaaaaatatgttttaattacatagggataatggaatgtatgaagtgtttgtatgttatggtgggcaaggttgatgatatggatgatggggaaagaactaattgacctttttcacaggaagaagtcaacagataaaatattacttttttttttctggtcataacctcatgtaagtggtaaaaattaaaagtaaggggaaaaaggcaacggggtagacatttattatagccaaaggagggtcaggaattctacttctggatctggggatgataggaaagttcaaaaattatttgcaaaattttgttcatatgtgcatgaatttctcaaaggagtttgtgacccctaaaatgtctaaagagtatagtgtagtgtgatgattgtggtgtttttcagcgtgttcgtgaaagtgttagttttagttttgattcttgatttatttttatgttttcatgtattcattatcttgttatatgaaagatgacttagtttggtaaagcaaataccattttttatttggttttgtattaaaataaacctcttaagtattgatttgtatctgtgctgccttctgagttaatgtcttcggctcttctagttcattgattttctgtttatgtctgtttaattctctatccctctgtcttccccacatctcacctccctttttttcctatttcatttattaaattttttatttctataagttccacttggatacttcaaaaatttgcatgatctttgtttgtatcctattccttgctcatttaaaaaattcttttattgctttaagcattttaaaagtagttatatattctgtatttgataattccaatagttgaagtgcttgtgggtctaattctatgctcagctgtcatttattgagttttgtctcttgtgtgagttatatttttgagtggtgagcttattttcatctgtgtcaactttggtggcttgattgagcattttaagagacttagagagcagttatgtgaacatgaattagtatggatatttggaaatctgaggctgtgggcccccttttagcaggatgtagattatgtgtgataaggttggatctacattttagtgactcttcgaatgcttggcaaagtacattattttataacactttctgtgctctaaatggggagggagtttttccttgtctgaagttagcatgatttggctaattaagtgaatactcatattcagtagttagtactctcctgcttaactaggtgtatatatttatttacatatatttatagatactatatatatatgtagaaattaccctttattccacagagacatttattgagcatctggtttatgatagacaaggtctttgatactggggatatagaggtattcaaggcagtctctcctgttggaaaattaaatagtagatgaaactgaactttgtatatattattaaagatgtgctagagtatccatattaaaagcttctgaatgcccaggcttatatgttcatattgtagaatggttgccttttaagaagttaaaaattaggagctccagctgaaggaggaggttaagtaaggagagctctataccatggctggtacaaagctaactgccagcagatgcaccagtggtaaaacacccaggaagcaactggctacaaaagctgcttgcaagagtgtgccctctactggaggagtgaagaagccttatcatcatgactataatacaatttatttgtcctatctcctatctatttggctattaagaataaagtagctatgaaggttttctttttctttttttttttttttttttgagacagagtttcgctcttgttgcccaggctagagtgcaatggcacgatcttggctcaccgcaacctctgcctcccaggttcaagtgattctcctgcctcagcctcccaagtagctgggattacacatatacgccaccacgcccagctaatttttgtatttttagtagagatggggtttcttctgttggtcaggctggtgtcaaactcccgacctcaggtgatctgcccgcatcggcctcccagagtgctgggattacaaccatgagccaccgtgactggccaatatgtatttatattttcttagtgtacttgtacctactcatagcacactatagacaaatgaaaagatgtttttttctcaattatttgaagcctctgtctccccaaaataaaaataagtctggtatgctgtctttactgatactctatacttttagtttcttggttttatttcaagcactgttaaatattttaattttgttttgtgggataatgtgatattgttccagttactgtagcggtgtaacaaaccaccatgaaacttaatggcttcaaataatcattttagtatgtgcttagattctgtgggtcaggaatttagacagaggattatgaagaggacttgtctctgcttcacgtctttggtctcagctgggaagacttagagtctggggctgactcttcacttagggcctagaatcagttgggggtatgttcacatttgtgcctggtggttgaggctggaacctcagctggactgttagtgagaatgcctgtactctccatgtggtctctgcgtgggctagtttgggcttcttgaaagcatggtagccagattccaagagttaagctcagtaataacttttggtacccacttttggttgaagcagtcagcgagctttgcttgggctcaaggggaggggatgtggacttcaccactctctgggaagatgtgagataggaaatgtggccgtgttacagattggattgtgtccttcaaaaagatatgttgaagtccagctatcacagtacccttgtacctcagaatgtgactttatttggaaacagggttgttgtaaatgtaattagggaagatacagtcactggaggggagaatgtcatgtgatcatggaggctgagatccaagtgcttgaagtgctgcaactgcaaaccaagaaatgctggtcattactggcaaaccacccaaagctaggaagaggcaaggaaagattctccctacaagttttagagggagaatgaccctgctgacaacttggttttggacttctagcctccagaactgtgagacaatacatttctgggtggttttttttttttttttttttttttggtgagatggaatctggctctgtcacccaggctggagtgcagtggcgtgatctcagctcactgcaacctccgccttccgggttcaaacaattctcctgtctcagcctctcaagtagctgggactacaggcacccaacatcactcccggctaatttttgtatttttggtagagacggagttttgtcatattggccaggctagtctcaaactcctgatctcaagtgatccacctacctcggcctcccaaagtgctgggattacaggcatgagccaccacacccggcttatttctgttgttttaagccacccagtttgtggtactttgtaacagcagtactaggaaactaagataacaattagttttcttgctgcatctgcaggggattggttccaagatcactgccctcatactaccatggatgcttaaatcccatatataaaatagtgcagtatttgtatataatatacacacatcttcctgtatactttaaaatcatttctagattacttatgatacctaatacaatgtaaatgctgtgtaagtagttgttatacagtactgttttaaaaaaaatctgtattatttttaattgtattattatattttgaatatttgtgatgcatggttggttcagaacctgcggatgtggaacctgtggactatataggccatctttgggaaatacagacttttacaaatgtgtcataaaaattattctatagcttttcccccgttacttgtattgggtaacaatatataataatatatggttgttttgctcacttatacttcttttttaaaaaagcttttttttttttttgaaccagagtcttgctctgttgcccaggctggagagcagtggtatgatcacagttcactgcagccttgacctcaggctcaagtgatcctcccgccttagcatcccaagtagctgggatcacagacacacgccaccatgcctggctaattttctttttaattttttgtagagacagggtctcgctctattgcccaggctgatcttgaactgctggacacaagcagtccttctgccttggcctcctgggctcaagtcatcctcccacctcagcctcccaagtaggtgagactacaggcatgcaccactacacccggctaatttttgtatttttagtggagacagggtttcaccatgttggccagactgatctcgagctcctgacctcaagtgatccacccacctcggcctcccagagtgctgggatttcaggcgtgagccactgtgcccagccagtacagtactttaaaagttatttttagtgtgtatagctgcaaagggaattttgaataggagataccttcattgaaatgtgctatttaacaatcaaaattaatcaaaagtcattgagaaagtattgagtactcactggtaaaaaggaaaggccttagacacattaaatttaacagagtttaattgagcaaagaacgattcacaactcggacagccttcagaaccagaacaagttcagagaactctgacctgcaatgtggtcaagcagcatttatggacagaaaacagaagcgaggtaaagagacagctcttttggttacagcttggcatttgctttattagaacatgggttcaatgttggctgcctaaagcttggttgctgtgattgattgagactcagctatttattacgtaagtatactgtacacccaacttaggctttcagttagtttgccaactaagttaggttgctctttgttatgtaaggactcaaggacatgggcatccttaggccaagtttagtttaacactattcaccaattttgttttcaggtcatcaagaagattcatgaagagtaatgaatggtctgtctttgacctacaggaatatatatgaaataatgtttttgttttatttttcagacaagctctcattctgttgcccaggctagagtgcagtggcataatcatggctcactgcagctttatgctcctgggctcaagtgatcctccacctcggcctcacaagtgcctctactacaggtctgtgccaccacacccagctaattttttttgtagagatgaggtctcattatgttgcccaggctggtcttgaattcttgatctcaagtgatcctcctgcctctgcctcccaaagtgttgggattataggcctgagccaccatatgtggcctgtttttctttcttaaggtactgagaggcagtagtacatctaatggtttataatataacagtgtaagcataatatggcacatatagcactgtggagatgaggtgataatgtatgtgaaagtactcagtgaatattatcattattaatgaatgtcacaatatttaatataaacaagaagtaccatagaagtgaagagaaacatgacacagagcacacaaacaccttaaagaatgagtactgttggcaactgagcagcatttctcagaatttgttttgcagtaaagagtgaaaaaggctgggtgggtggtccacgcctgtcatctcagcacttttggagcctgaggcaggtggatcgcttgagccccaggagtttgagaccagcctgggcaacatggtgaaaccctgtctctaccaaaaaaaaaaaaaaaaaaaattagcctggcatggtagttgtgtgcctgtggtcccagctactcaggaggctgaggtgggaggattgcttgagctcgggaggttgagactgcaacaagccatgattgcaccactgcactccagcctgggtgacaagactctgtctcaaaaaagagaaaaacgattcctgactagtcaagtttggaaagtaaattcctctaccttctacttttgacagtgtataataatgcctgagaattgctgtaataaaaaaaattttacttacggacttcagcttttaatgatgtgattcactacatagcttggaaaaactcttcctctataaagcacctcaaaatgcaaacatccttttaaatgcaaagttgtattttcaagaatgtaagagaaatgccccttctccaaaaacagagccactctagaaaccaccagattgtcttcaagtctgccgtcctctgtgtgtgtgtgtgtgtgtgtgtgtgtgtgtgtgtgtgtgtgagagagagagagatatttggcataattatattaatttcaaacaaagcaaacttaagaaggagaattatcagggataaagacaggcattacataatgataaatgggtccgttctcaaagaagacaaaatagtctgtgaggcaaaaaccaatagcagtgtaaggagtaatagacaaattcactattatagttggatgcctcaacacctctcagtaatttatagtgtagcagacagaaaatcagttaggctatagctgaatagcaccatttatcaactggatttaattgatatatatagactgcttcatccaacaacagcaaaaaacacatttttctcaaactcatatggaacattcgccaagattaaccacattctgggacataaaacacatcttaacttgtattctcagaccacggtggaattaagttagagatcactaacaattatctatacaacttgtgttgtatagttagaaagatatttggaaaatctgaaaatacttgggaattaaaaaacacacttctaagtaacacatgagttgaagtctcaaactaaaaatattttgaactgaaggaaaatgaaaagcagcaaaagcagtgcttagagtttgatttatattgaatcatatagtagaaaaaaagattcaaaaatcagtgattaagcttctactttagggaactagatagaagagcaatataaacctaaagcaagcagaataaaataaataataaaaattagtagaaatcagtgaaatagaaaacaggaaaacaattacaaaattaatgaaagaaaaactgtttcttttaaaaggcattgaaagtgacggacctctagccagggtaacaagaacaaaagagagaagacacaaattactaatgtcaagaatgaaaggggtaattttttcccccagatttcattgtgataaagtattcataacaaaatttacagttttaaccattttaagtctataattaagtatattcatattgttgtacaaccaccatcaccatcatctctataattttttcatctttccaaagaaactctgtggccactaatcaataactccctatttcctcttcccatggcaaccaccattttactttctgtctctgtggatttgactatctcataaaagtggaatcacacaatatttgtcattttatggctggcttttttcacttcgtataatgtcctcagggtgtgttcatgttgtggtatgtcagaatttccttcccttttttttttgagacggagtcttgctctgtcgccaggctggagtgcagtggcacgatcttgatgcactgcaacctccgcctcctgggttcaagcgattctcttgcctcaacctcccaagtagctgggattacaggcgctcgccaccgtgcccagctaatttttgtatttttagtagacacggggttttgccatgttggccaaactggtctcgaactcctgacctcaggtgatccgcccacctcagcctcccaaagtgctgggattacaggcgtgagccatcacgcttggccctccttcctttttaaggctgaataatagtccattgtatagagatagcacattttgtttatccattaatccattgatgtacacttggttgtttatcccttttggctattgtgaataatgctgctatgaatatgggtatataaatgtctaagtccttgtttcagttctttggataaatacccagaagtggaattgctggatcttataattctgtgttaaattttttgaggaactgccatactgttttcgacagcagctgtgccatttatatttccattaacaatgtcaacacttgttattttcctttttgataatagccatcaaaatgtgtgtgaaatgatatctcattgtggttttgatttgcattttatttaattttaatttaatttttttttttgtgagacagagttttggtcttgtcgcccaggctggagtgcaatggcactgtctcggctcactgcaacctccacctcctgcgttcaagcgattctcctgcctcagcctcctgagtagctgagattacagggacccgccaccacacccagctaatttttgtatttttagtagagatggggtttctccatgttggccaggctggtctcgaactcctgacctcaggtgatccacctgcttcagcctcccgaagtgctgggattacaggcatgagctaccatgcctggctgatttgcattttattaatgattggtgatgttagctgggcacagtggctcgtgcctatagtaccagctactcaggaggctgaagcaggaggattgcttgaggccaggagttcaagaccagcctgggcaatatagcaagacctcatctcttaaaaaaattagtaatgttgaacgtattttcaaaagcccctgtgattattggccatttatatatcttctttggggaaatgtctgttcaaatcctttgctcatcttttaatcagattatttgtttttttttgtgttattaatttgtaggagttctttatatattctagatattaaacccatacagctatatgatttgcaaatatttgctttcatttttctgggttatttttactctgttgatacacaaaagtttttaattttgatggagtccaatttatcttttttttccttttgttgcctgtgctttttgtgttagtctaaggaatcattgccaaatcattgtcatgaagtttttcccttacgttttcttctaagttttatagttttagttctattatttaggtcttcaatccattgtgatttaagaggtcttttaaatgagctgaatctttgatttcttatctctaaaatggagacattacctactttatagaattatgaatgagcactaaaatgagttaatatgaaataatgtgaaaagtcctaaaaaataaaatactgagttgtcagatcagcctttatattataaaacaagctaactccacagtgacaaagaataaccccatcagcccagttttctgaattgtaccagtttttttttctttttaaaataaaatcaaatgaagttactgtctgtttgaaggcccttttcgaaaatagagtttgttatgtaataatatcctgactatccttttggaatctccaggctttaggaattagtctgattcaagaaatctcaaaaataaaggtcattgtggtaggaatgggaatattttgcagctcttatttctgtatctctcagatactcctcaacttactataatctggtttctgccttcttttggtgaaatggactcactgaagtcattagtgaccacatccattgccaacctttggtcttgctcattcttgatagtggttaagagcaaggaatctccaaccagattgcctgtgtttgacttttattagctttgtgaccttatgtaagttgtatagcatttttgtgtcatcatttcttcacttgtaaaatgtggaaaatagtaatacctactttatagcatttcaataattaaatagatttaatacatataaagtgtttacaacagtacctggtgcgatttaaatgctgaaaaagtgtttgcggatatattcccctcctttttgaaactttgtttccaaacctctggcaccatacagtgggagttgcatggaatctacgtagagtttaggtagcgcagaaggctggtcaaaatttcatatcagagtccctaaaaaccataccatgtggaaactgttatactggctttcagtactaagtctaagactgccatacaattaacaaagatactgaagggagtgatagggatactattttagatacttttccatatgactataagaaatacaggaataatgacagggtaaggtactatctttaattatagcagtctccatgctttgcatagtgacttacacagaatactcagtaaatattagttgattttatacatacatgtatacagacacacacatacacacatatgtatatctgacatagtaaaagtgagcccaataaaaaataaaaccaaaatcttgacctgtgtgtctttggtccactcatctcgaggaaggaacatgagatgtctggttggcagtccctcataatggccagttttgtgagaatcaaagagtgtaagaaaattgtcaagagacaagaaaccagaaaagaaaagaaaaagcggagataaaaatgagtgtaacacagattagaggggtggggataaacagcaggtactttggagaagctaataagagacggaaaataaagcagttttgcattgtggtgtggtggtggaaaagtctcttagtcctcaatagcccttgaaagtgtttgagcttctgtgttaaaagctacttgtctctggttcctgtactttttgaaggaagattgtaaaatgataatagatagtgaaatgtttatataagcaagctgtatgtacactaatggtaactatattttaaaatcatctcatgtgttcattcagtaaacagatatgaaaaagtattaggaaatattccctggctctaaggaagggtaaaaagatagaactgcaaaatgattggtgaatctttgtgacatctgtatatagctgaagtcctgacattatgaaatgtgttctgccgcactgcccctttttttttttttaaaggtaacttgacttttgacatttaaagatctgttgggtttttgactctcggtgatggcacaggtacccatactcatagttcctctttacccacaatagtaccctttacccaggggggaatattatactctagaaatgtgattcagtttcacagtatgattcaggaagtaattaaccatagccatgtccttttctccctcatgattttttgatctaaaatcagaatctttaaaaatagatctattttagggaagttaagagcatccttttaataaaatataaagtgatataatcatgtctgtttctcatgggagattgtattcaactattgtaatagtatgtaacgcttttactacacttaaaaaattgagatataatttatataccataaatttgccccttttaaagtgtataattcagtggcatttattatattcacaaggttgtgcaaccttcaccactgaccaatcccagattattttcatcaccccataaagaaatcctgtacccattagtagtcattttccatcccttttcccaggccctggaaattactgatctacttctggatttgcctgtttggaacttttatgtaaatggaatcatacaatatgtggccttttttgtgtgtgattactaagcctttttaatgatggttttagcattttcaaagtgtgttcgctttttttttttttttttttgagacggagtttcgcttttgttgctcaggctggagagcagtggcgtgatcttggtgcattgcaacctctgcctctcgggttcaagtgattctcctgcctcagactcctgagtagctgggattacaggcgcccgccaccatgcccagctaatttttgtatttttagtagacacggggttttgtcatgttggccaagctggtctcgaactcctgacctcagggtgatctgcctgcgttggcctcccaaagtgttgggattacaggtgtgagccaccgtgcccggccagtatgttcactttttaaaataaatgcataacacctctatgagatagacaggaactttgtgacatatttacattgtcagatttgtttatatttatttatgtgacctcaatttaccctaggttgaggaaaagagattcagaggtggcagggtggaagtttggaaaagtaaaattaaaggaaaaatagtacctgatgatatatgaaaaaataatttagccctgtgggatttctagattctatgaatattaaactttattaaattgcagatgcaattaaatactctaactatatttaagaacttaaaacttgaagttcagtctttagtagttataggctgaattccatttcagtgaggtctaaagcatgtcagaattgtgcttttgattatttcagactctttaaatcgaagcctgttgctacagtgtgcagaaggggtatgatataaatttcttttaataaagcaattaataggtgtcttttgcttttgcagcaattaacttactgagtaggggagtttaatataatgaaaatgtaaagcattaattattgaaaattgtaagtatatttgaaattattggtaaagtgtaccatttttttataaattttatacattaggttttcttccgtttttctgtaaattttatacattaggttttctctttttaaatattagagtgtgctttggggatgcgaatttgtgccattttcacaattgagtttatagttgttatcctaagatcgataggataacaaatcacacagtaggctatcttagtgcctactatggcttctgtcatttcgtggcacaaataaagttttggctaaattattatttggttcctatacggccttttgccctgatgagctgttttcatctatgagttgacaggaaggacttcttttgcctggaagcaggcataaacgatcacctcatgcttctctttcttaggtctcttatgccattcaacttttctttcttgggattcgtctctcaacggtaacagcccactgatcctttctataatatcatttctaaaggaagtaagttctaaaaggggaaaattattggcaaatggaaagaaaatgagaggcatcttgagtttaataaaactcttgcccctattcagcacttgtaatggaatctttgtccttttagatgctccatcctcaggttaagtggcttaactatgtccttagaattgcttttccattttatcctttccgtacatggaatttccctgctaaattgaagtggaggaagtggagacagagaaaaagccatgtatatattgagggcaggaggaaatgcttgggtaaccaatgaggagagtggtacctactaccaggacctggacaggattttttttttgtgtgtgtacatatgttcatatggattgccatatataaaccagtgttagctttgaacagtatgtacattttctttttcagctgaatttgttgtatacatatctgcttaggaggttggcatggtttatgacaaatatgtgagcatatgtataattcgttgaatcttagaaaagagaggaatcttaaaggcttttttcttcctggttagccacctaaaacagaaacttaacccttaaccaacgcttgacatttggcttttacaattgccacattaacgtagctattggtagagaatgtactactctttcctaggcatcccattctatttctgaataagccaactattagaaattctaccttgaacccctctcattctattaacccagccatttaccataattttgttcctggggtgctagtccctcttctataacaacactctttagtggtttgaagagagatcaatcaagggcctcactacattttatttatgctaaatacacccagtttttgttgaattgttagtcatgttacaggatttccctgatcatctaatggacatgttttaattccttgacttgcatatgtttttgactaaaaccccaagaatacattttacatcctcactcaatacacccatatacatacatacatgtaggatgtatttttaaaataacaaaaatttcattagacagcatatctttaatttgatatttttgctctttttcatttttgaaacatgctggttgatttttgtcactcctgatgggtctcagtttggaacactgttctgatttgttcatgctgcagaactgaaataaacagtttgcaaaagctggatattagggtattgttgctaaaacaggttttacctttacttcctcaaagagaatattctgatgatggttattaagtaaatcctaacagaattattaagttctcggtaatgaatacagtgtaactaaagtatatgcaacttttatttttgtccttaggtggcgacagacaaagttgcagaaaagctgagctctactctctcatgggtgaagaacacagtatcgcatacagtcagtcagatggccagtcaggtggcaagtccatctacttcattacataccacatcctcatctaccacactatcaacaccagccctttcaccatcttccccatcacagttgagtccagacgacttagaactcctggctaaactggaagaacagaataggtgagtgaggttgcttagcttttttctctccaattatacaaatccagccattcatatttacttacactagaatttttttttctattttttggtttcttatttatcaaagttatttacagaagtgttcatcttttttggggggagattggtcttaaaagagactaacattttcttctggctcaaatagctttagagatttgttttcttaatatagcaaattccctaaatccttcttgaattttatcaattttttaaaaagtaaatgaaactataactttataattttaaactctctgaacagtctcctttggtaaaagcataaaataatttaatccagtatagatatctgatttgtggtttagagtgcaaaatcttttcataaattattcatagaaagcaaaatatccttttctcctaatggtattaaatagaatagttttctgctctgctaggaatgcatattccggactccgtttgtttccttaccatgttattgtcagaggctctttagggcatcatctcttttatatatttatttatatatatataatatatattataatagattatattataataatatataatatacaaaatatataatatactttataatatgttatatataacatatatcatattatattttaatatgattatattatattatattatatataatataatattgtatatttcaatctatatatatgttatatataatatattttgttgaattaattatgatatatgtatatataatatatatgacatatatcatatatcatataattatatataatacataatataatatatacattatatacatatggaagagcacccttttgtgctcagtcaagctatataatgctactggcttaaaatcataacaaaaataacttttaacaggttttttgatgtattgttgtaatcaactatgcgtaaactgtacaatttgatacattctgacatatgtatacacctgtgaaattgtcgccaaaatcaagaaaatgaacatctccattatccccgtcgctgtccccaggcagccactgtagtttgcattttctagaattttgtagaaatggaatcatacagtatgtagtttttttggtatggattatttcactcagcataattttgaaagtcatgttatagcacatattgatagttgattcctttttatagtattccatcatgtggaaatatcacagtttattcactcacctgttgctattaaatgccataaacatttgtgtttaagcctttgcatggatatatgctttcatttctcttggaatggaatgactggatcatatggtaggtatatgtttaactgccaaactgtttttcaaagggcctgtatttttgatatcccgccagcagtgtatgaaattaccagttcttctacatccttgtcaacacttggtatgatcagtctttttagtttaagccattttattaggtattagtatctctggttttaatttgcatttctctgttggttttgagcatctttttatgtgtttatttgtcatctgtatatattctttgattttttaaaaaaaatttgattatttgctttcttattactatgtttggagagttctttatatgtttggggtaaaagtcttgtatcaagcacatgactttcaaattcttcccccagctggcagcttaccattctcttaaaagtgtctttcaaaaagcagaagttttatcttattttatttatctttgagcattccaagtttactcctttaagtaaatctaaagccactatacatgtccatgacaattagaatagaaaagagacaaaggataaatagaaatagtttctgttggaggtggagcttgcagtgagcggagatcatgccactgcactgcagcctgggcgacagagtgagactccgtctcaaaaaaaaagaagaaaaagaaatagtttctgttctgcttatagtagtattttctgggtgtcaatagaaaacatcagtcaagagcatttatctgaatttgttggtaaaatgtagttactttcggcaagtgttttgctttggtatttatacacggaccgtaatgaagttgagctatcccatctttcttctcatttgtaacacattcatacaaacaaaaaagatgaatcctactggaagtgggtctttatcagaaatatgccccaatgcagttaagtgataccaagaaaatcattctctcatcctaggcctaacattcttcatgcaaaaattaggagattgaatgaatatgatctgtaagttcctacaattaatgtatatacatcaatttatacatcatgatgtaggtagacagcgaggctatactttccggcccccatgatgctaggcgtggccatataacttgcttaaagcaaatatggtacatgtgtcttgtaagagaaaactgaagtttctttcatctcttgcttcctctgccaaaagaatgacagtgtcccaaaagggactttgcttcacttttgatcctggagtgaagatgacttggagcagtgctacagccagtcaacagctgacagtactcaacaggaaacgcacctttgttgttgttaactgcagcataacctaatgaaagctaattaattataataatttgcaaataattgaggatcagcacatagttaaaacacaaacactcaaatttaatagaaagctgataatgtagaccgggtgctgtgtctcacgcctgtaatcccagtactttgggaggctgaggtgggcggattgcccagtctcaggagttcgagaccaccttgggcaacatggtgaaacctcatctttactaaaattaaaaaaaaaaaaattagctgggtgtggtggcgcgtgcctgtagttccagctactcgggaggctgaggcaggaaattgcttgagcgtgggaggtggaggttgcagttagctgagatcatgccactgcattccagcttgggctatggagtaagagtccgtctcatttaaaaaaaaaaaaaagatgataatgtaaaatacgacatcagtggaaataagttaaaaagcaacttttaagaattaaaaaaagaaattgtagtaaaagaaattgacttaaccatgtatgtagaattttccttgtgatttctggcccgaatccttgaatgactattccaagtaagattcaacatttttacaaaattatcattcatcattaagatactccaagattttatttccaccattttataaaggacaatccaatttagcaatccaggtttccaaagtaagttctaaggataaggcttctcctgaagtaatgtgacacaaccttaatttcttagctgttaattttttttttcttttttttttttaaataaaatggagacgaggtctcactgtattgcccaggctggtctcaaactcctggtctcaagtgatcctcctgcctcggcctcccaacatgtcaggattacaggtgtgagccactgtgcctggcctgttagtgtaatttttttttttttttttttttttgagatggagtctcacatgtctcccaggctggagtgcagtggtgcgatctctgctcactgcaatgtctgcctcctgggttcaagcaattcttctccctcagcctcccaagtagctaggattacaggtgcccgccaccacgcccagctaatattttgtatttttagtagtgacggggtttctctatgttggccaggctggtctcaaactcctgaccttgtgatccgccctcctcagcctcccaaagtgccaggattacagacgtgagccaccgtgcccagcctattgtcaaagctttaagactggccagagaagtggcaaagtttgtgacctttctgatgcttcatccatggaaaagaacattggtttgcccttctctttgctccccttaggtaagaaaacttgaaagcaaatagtttctccctgtggcagtgatatatctccatcagcatatatcctcaatttcaatgcaattcctttgcagctgtttcactattttttgtcacctttcccttctttgcttgctgtctctcctgttttggaatcaatgtctttaacaagttactgagtggcagtcatgtaaggctttgggatttccagtttttcacacttgtgatctgactgatgatggtgtctcaggcaaaaattattctcacagtaaggacgtataactgccacaagtttttcaacacggtccttgaatgagcatgggtaaaatttatgtttatgtcttcagtctctcattgattacagtcatctcaggacaaccatgagactgccgccagcttttgtattcaaggcaaaatattcctgagtatcacacacaaatgaaagaaaatctggcagtgctgcccagtgttcaactgtgccatctctctcgtgccactaaagaacagaaattttaaattttgattaagttacaatttcaaattgttcttttatggattgtgctttcggtgatccaagattataccgtttctctcctatttttttcctgaacgttttatagttttaagtttgacatttagctctgtgatacatttggagttcattttttgaatatggacatctaattattcctgtaccatttattgaaatggctgttctttctttacttaattacttttgcatttttgtcagatatcagttgtctgtatgtgtatgagtctatttctgggctctattctgttctgttggtctacatgtctatcttaatactagcactatactgccttgattattgtaggcttatactgagtcttgaaatcagatagtgttaggcctccactgttgttctttttttggcctatttttggtccttggcatccccaaatgaattttacaatcaagttgttaatttctacaaaaacgcctgctgaaattttggttgggattgcattaaatctctaacaatattgccttcctccccatgaacacaatgtatttctcaattattatttgtcaatggtattgtttttgtaaacttcatttttaattgttcattgctggcatatagaactacaattgtcaacaccttctgtgttaaaaagaaaatacaattgtatttctttttttgtttttttgaaatggggcctcactcactcaggctggagtgcagtggtgtgatctctgctcactgtgacctctgcctcctgagttgaagcaattcttctccctcagcctcctgagtagctaggattataggcatgtgccactatgacggctaatttttgtatttttagtagagatggggtttcaccatgttggccagactggtctcgagctcctgacctcaagtgatttgcctacctcggcctcccaaagtgctgggattacaggcctgagccactgtgcctggctctacaattgtttttcttatattgattcatgtatcctgcagctttgctaaactcagttattgttttggtagttttttttggtttttgtctagattccattagattttctatgtagatgagcctatcatctgtgaataagagcacttttgcttctttccaatctggatgccttttatttattttcttgaccattgctactaactgggaacctcctgtataaatttgaatggaagtggtgaacagacatacctgttctttttctgatcttaagaagaaagcattaagcttgatgttaactgtattttttggatatggcctttgtcagactgaggaagttccttttttttttttttttttttgtgagagaaggtcttgctttgtcaccaaggctggaatgcagtggcataatcatggcttgctgctgccttggtctcctgggctcaagtgatccttccacctcagcctcctgagtagctagaattacatgcatgcaccactacacttggttaatttttttttttaatatttttgtagagacggggtcttgcttcgttgcctggattaatctcaaactcctggcttcaaggacttgggttcccaaagtgctgggattacaggcgtgaaccactgtgaccagccgctttccatttctttctttctccatttccttctttctttcttttagagatgggggtcttgctctgtcacttaggctgctgtagtgcagtggcacaatcagggcttgctgtagccttctcctgggctcaagtgattctccaagccctgcctcctgggattacaggcacgtgccatcatgcctggctaacttttgtacttttttgtagagatggggttttgccatattgcccaggctggtcttaaactcctgggctcaagtgatcctcctgcctctgcctcccaaaggctggcattaccggcattagctattgcacttgacacctctttctatttcttgtttgctgagaatttatgtaaaacagattttggattttgtcaaatgctttttttgcctctactgaaatgatcattaatggttttcttctttcagtctgataatacggcaaattacattgatttttcaatgttaaaccgactttacattcttaggataaaccccacttcatcattatatcttttctttgtaaagtattggattcaatttgctaaaattttgtttgtgatacagtctgcgctccatatccacaagttctgcatttgcagaaccacagatggaaaatacgttttaaaataagaaataacatacaacaataaaaataatacaaataaaaaatacatataactattatataatgtttacattgtattaggtactaaaagtcatccagagctgatttaaaatataaggaggatgtgcataggtcatatgcaaatactataccatttgatctaaggacgtcaccacccacacattttggtatctttggtatctttggtatcagggaaccaatccctgaaggatatggagagttgaatgtatttgcatctgtgttcatgagggaaatggatatgaagttgtcttcaaaagtccttgacctttatcggtaatatgttgtcaccttgtaatgtctgtgtgacctttcttttctaataaagtcatttagtgctatatagtagtccccccttatgtgtgcgggatactttccaagacacccaggagatacctgaaactgtggatagtttcagacctcattgtcatcaactgaaacgtatttctgttcatgacttctactcacaaatttaatgctgttttcatcttaattaagcatttatcatacattgtgaccataacttttgtagtttgaagtgcaagaataaaatcagtatgaatttatttttccttcacagtttcacagatagaagatttattcttaccataaatcttagcagcctcagcattcaattttgtttgtttccttattaagtagagaactttcaccttctcacttgaaggaagcactttaacagcttccctttgacatattcaaattgccagcatcactacttttgtggtttggggccgttattaagtaaaataagggtgggttgaatgcaatcactgtgatatcgcaatagtatatctgataactgactcagatggttactaaatattagccagctggtagcacatacagcatgggtacactgggcaaggggatgattcacttcccaggcaggacggagtagcatggcatgagatttcatcgttctgctcagaatggtacacaatttaaaacttttgaattatttacttctggaactttctgtttaatatttttggactacagttgattgtgcataattgaaaccatgattcgctgggcccggtggctcatgcctgtaatcttagcactttgggaggccaaggtgggcggatcacctgagatcaggagttcaagaccaacctggccaacatggcgaaaccctgtctctactaaaaatacaacaattagctgggcatggtggcgggtgcctgtaatcccagctactccagagggtgaggcaggagaactgtttgaacccaggagacagagattgcagtgagcagagatcgcgcctctgtactctgcactctagcctgggcgacagagcgagactttgtctccaaaaaaaaaagaaaaaaaagaaaccatggcaagtgaaactgtggataaggggtgactattattggtacatctttgttggctttctgtttacatgttatatcagatattgagagaagagcagtaacttcaaattataattgtggatttatctatttctttttaaattctgtctttcatgtaatttgaagttctattttaggtatataaacatttaggattgttatatcctcttgtaaaatgaccttctttatctttggtaatgttgtttccttggaaatctactttatcttatattaatatagtcactctagcttccttttgaatagtgttaacatcttatatattttcccagccttttgcttgtattctatttttttttgtttatctttaacttttttttttttgagacagggtcgcactctgtcacccaggctggagtgcaatggtatgatcatggctcactgcagccttcatctcccagactcaagcagttcttccatctcagcctcccaagtagctgggactacaaaattttattatttttttaagagatggggtcccactatgttgcccaggctgttcttgaactcccggattcaagcaatcctctcacctcagcctcctaaaatgtttggattacatgtgtgagccatcatacctagaaaaaatctttggagtttgtctgttagtagcatttagttgggttttgcttttaaaaatacaatctgacaatctttgtcttttaattgggttatttaagccattttatttttttaaaaaattaaagttttattttttgctcacatttacattcatctcaattagtaggttggatacatctttgctttactgtgctttgttctgtgaccgcagccggcatctatctgggataaatcagactcatgacagacagaaaagagatctagttgaaataccttaaagcatcccctagggagtggtatacataatttctacttaaattttattggccaaagtaagtcagatggccaaaccttttatgagcaaatctagcagggatggatctaaaattcacacttttaaagggtacagtttagtggtttttaatatgttcacaaatttgtgccattattactactatccaaactcccattcagaatatttccatcaccccaaaaagaaactctgtacccattagtctcctcattcaccttccttccagcccctggtaaccactaatatattttctgtctctatggatttgcctattctggacatttcattatgatggatacaataagtggccttttgtaaccgacttctttcatacaacataatgtttttgagatttttgaggaaaataggttatttacatttaaggtgattattaatattgttatatttaaacttgtcttatattgtttcctttaattctgccatctttgactttattgaatatttttatgattttgttatagttcatttattgatttataagctataactgttattttggtggttgtgttaagatttataatataaatctttaacttatcagtctgactttgagggttataccacttcacatgtactgtaagcaccttataatagcacacttgcatttctcctgtccagtcctttgtaccagttttgtcatgcattttacttttatatgtgttataaactctacactacattattttttaactcaacagtcaattatctttaaatgagattgaaataataagaaaaaacttttatgtgtttacctatttagttaccatttctaatgctcttctgtcctttctttagatccagatttccatctgatatttccttcttgaaatactttttctttaacatttcatgtagttggtggtattggtgatgaattatttagcgtttgtatgtttgagaaggtcatcattttggctttgatttttacatatatttctttgactatagaattctatttaataggttgacagtttttattttccaaatattttaatgttgcgatttcattgatttctctcttgtgttttcagtgagaaattcagtgtgttccttgtctttttgtttgtttgttactctcaagcacatttgtttctttgtatatgtctcttttctctgctttatcactggttttaagcaatttgattctgaggtgtcattgttttttccatgtttcttacatttgtgatgtgttgaacttcttatggatttatagttttcttcaaatgtggaaattttggagccaatgttttcttcagataattttttgtccctttcttgcctcttctttagagactctaagtacacacatattaggccacttgaagttgttccacagctcactgatgctttgttcattttttggaaagttgctacgtattcaaattcactaatactgtcttttgccatatctaagttgctattaatcccatctagtgtattttttatctctcacattgtgttatagttttatctttagaagctagagctgagtgttttttaatatgtctctattaaacttttgaatatataggatacagttataataacttttaatgggctctctggtcattctaacatttgagttaatgctggtttgcttttgatggattgatttcccccccacctcattattggttatgcttttcttctgctttgcatgcccgatttttttttttttttaaacaaaatctcactctgtcacccaggcttgagtacagtggcgtgaccacggctcactgcagctttgacctccttggctcaggtgatccttcgacctctgcctcccaagtggctgggactacaggtgtgtgccatcatgccctgctaatttttgtattttttgtagagatggggtttcaccgtgttattcaggctggtctcaaagcctgataattttttattgaatacctgagattgtgaattttatcttgtcgtgtttgactattttctattttcctataaatattcttgaattttgttctggcatgcagttaaattacttcaaaagaatttgttctggagtaatacagaacctaggactattattcccccctactgaggcgagacccttttgtgtactcttcccaatgtgtcttgaaacagtaacttttccagtctggctggtgaggataggtataattttctaccatgtgtgaatgttagccatggttacatctaatcttttctggtggttgattctctggccatggatagtttccttacatgaatgcattgatcagttcccagctgaatatttgatggagatctacctatctctgaagatctctgtatagttctttcatctctggtcatgacctgtgaactctagacaccttggtctcactgccattgagtacctgaaatatggtttatctgacttgcaatgactcttctcatcatctcctcagttcagggagcacacaagactgtatctcaattttccccacctgttatagggccctgaaactgaatttcaaggtggttaaaatggcagtcacagagtttactttacttatgtcccgagtctcaggaattcttctccaatgctgcctgttgtctgaagtctttatttatatatatatttattttttttaaagacagggtcttactctgttgctcaggctggagtgcaatggtgccatcacagctcactgcatccttgacctcctgggctcgggtgatccttccacctctgcctcccgagtagctgggactataggtgtgtgccaccatgcccagctaatttttgtactttttatagagatggggtttcgccgtgttgtccaggcttgtctcgaacgcctgggctgaagcaatctgcccaccttggcctcccagggtgttggaattacgggcatgaatgagtgtgccaagcctaaagtcttgaaaatcattgttcgatataatttaatgtattttgttcaatattttttggtttcaggaaagagggtaaagctagtctctattatttaatcacggcaagaatgaaataatttttcatataaagttttgtattttcctttggcatggtatcggaggaaccagcccccagtatttcaacgtaggttcttttctattttccctaagtgtcggccggtctgagaaataaagagaaagagtacaaagagataaattttacagctgggcctcagggggtgtcatcacatattggtaggaccttgatgatgaccccgagctgcaaaaccagcaagtttttattagggattttaaaaggggagggggtggaacagggagtaggtcacaaggatcacatgctttaaagggcaataaagatcacaaggcaaggcaaaattagaattactgatgagggtctatgtcccactgtgcacgcattgtcttgataaacatcttaacaggaaacagggttcgagagcagacaaccagtctgactagaatttaacaggctggaatttcccaatcctagtaagtctgagggtactgcaggagaccagggcgtatttcagtccttatctcaaccgcgtaagacagacattcccagagcagccgttcatagacctacccacaggaattgcattccttccccagggttattccttgctgggaaaataattcagcgatatttctgctactcactttctgcaagaagaaaaatatggctctgttctgctcgaccccgcaggcagtcagaccttatggttatcttcccttgttccctgaaaatcgctgttattctgttctttttcagggtgcactgattttctattgttcaaacacacatattttacaatcaatttgtacaatagtgatcctgaggtgacgtatattctcagtttacgaagataacaggattaagagattaaagtaaagacatgcctaagaaattataagagtattgattggagaagtgataaatgtccatgaaatcttcataatttatgttcagagattgcagtaaagacaggtgtaagaaattatcaaagtattaattttgggaactgataaatgtccatgaaatcttcacaatttatcttcttctgccttggctccagccggtccctccgttcagggtccctgacttcccgcaacagcatgggaagaagtctgaatagaattagaaaaattgatttatattatttgacaattagatattggacttaatatcatgtataaatatattgtgaatgttacttctgcttagctttaaaaaaatgtactgctgaggtaattattgaagtaattttataattttactgctgagattatttttactttaaatagacctgtcctcagacttggtcccttcctattgagatggagacagacaacagtagcttgaaggaaattcacagggaacaggattaggaactatagattttgagtctggcttaattgagccccaggaataggacctaatatcaactcatgcaaacctggtgatagaaaatactgctttcttatcatttcttaggaagcccttttaaaggttttctttggctctcagcactcagtgggtaaggtagaaagctgggtgtgccacataactttttgtgggtttagtgtgtgtatatgtgttttggttttaactttttacccctttgtttactacatttgaaagattttgagcaaatcctctggtcagaagttttgggaagagatagtcttttaaaataatatgtagattctgaaagtttcttggataagatgaaattagaagaggatcttgaaagatcaaagtggagtgttaggttgtgtgagggctgttatgagcaaataggttctcagaaaaggaaatgaaagggactattaaatagagcaaaaggagatatgtgatagaaaaatagtgggaaaaccaaacactgcatgttctcactcataggtgagaattgaacagtgagaacacatggacacaggaaggggaacatcacacactggggacggttgtggggtggggggaggggggaaggatagcattaggagatatacctaatgctaaatgacgaggtaatgggtgcagcacaccaacatggctcatgtatacatatataacaaacctgcacgttgtgcacatgtaccctaaaacttaaaagtctaataataataaaatttaaaaaaaagatattgatcaaaggatatgaaatatcagttagataagaggaataagttcaagagatctatagtataatacagttactattgttaataacagtatattatattcctgaaaattgctaagagagtagcttttgtgttcttaccacaaaaaaaagtatgagaggtaatgagtatgtgaattagcttgatttagccatgtggtacatgataaatatatacaatttgtatttgtcagcataaaatataattttaagtaattaaaatagtgggacatgaagttggggcaggactgacaaagtaaagcacttacagacagtgctaaagggtataaaggatttttaagtgttcagttggttattatatacaaggatgaagtagtttccagtaaagataacttctggtatagattttgtaagtgaccaaagttgaatttatttttacggttgtgatcagtaattactgtgcaactaaaatacacaaagcgttatattaaaattgttgtaggtaaggtgtggttgtagatgaattgcttattcccatacaattcacaatttaccccagaataccagatgtgtttaatatatatgttgacaactaaggaataattactggagttttaaaaaaaattattgttatactttaagttctagggtacatgtgcacaacgtacaggtttgttatataggtatacatgtgccatgttggtttgctgcacccattaactcatcgtttacattaggtatttctcctaatgctatccctcccccagccctccaccccttgacaggcaccagggtgtgatgtttccctccctgtgtccaagtgttttcattgttcaattcccacctatgagtgagaacatacagtgtttggttttcagtccttatgatagtttgctcagaatgatggtttccagctttatccatgtccctacaaagtacatgaactcatccttttttatggctgcatagtattccatggtatatatgtgccacattttcttaatccagtctatcattgatggacatttgggttggttccaagtttttgctattgtgaatagtgccgcaataaacatacgtgtgcatgtatctttatagtagcatgatttataatcctttgggtatatacccagtaatgggatcactgagtcaagtggtatttctagttctagatgcttgaggaattgccacactgtcttccacaatggttgaactaatttacactcccaccaacagtgtaaaagcattcctatttctccacatcctctccagcatctgttgtttcctgactttttaatgattgccgttccaaatggcgtgagaggtagtatctcattgtggttttgatttgcatttctctgatgaccagtgatgatgagcattttttcatgtgtctgttggctgcataaatgtcttcttttgagaagtatgtgttcatatcctttgcccactttttgatggagttgtttgtttttttttcttgtaaatttgtttctttgtagcttctggatattagcccttagtcagatgagtagattgcaaaaattttctcccgttctgtaggttgcctgttcactctgattgtagtttcttttgccatgcagaagctctttagtttaattagatcccctttgtctattttggcttttgttgccattgcttttggtgttttagtcatgaagtctttgcccgtgcctatgtcctgaaaggtattgcctaggttttcttcaagagtttttatggttttagatctaacatttaagtctttaatccatctcggattaatttttgtataaggtgtaaggaagggatccagtttcagctttctacatgtggctagccagttttcccagcaccgtttattgaatagggaatcctttccccattttttgtttttgtcaggtttgtcaaagagcagatggttgtagatgtgcggtgttatttctgaggcctctgttctgttctattggtctatatctctgttttgataccagtaccatgctgttttggttactgtagccttgtagtgtagtttgaagtcaggtggcatgatgcttccagctttgttctttttgcttaggattgtttcggcaatgtgggctcttttttggttccatatgaactttaaagtagttttttccaattctgtgaagaaagtcaattgtagcttcatggggatagcattgaatctataaattactttgggcagtatggccattttcacagtattgattcttcctattcatgagcatggaatgttcttccatttgtttgtgtcctcttttattttgttgagcagtggtttgtagttctccttgaagaggtccttcacatcccttgtaaattggattcctaggtgttttattctatttgtagcaattgtgaatgggagtttgctcataatttggctgtctgttattggtttataagaatgcttgtgatttttgcacattgattttgtatgaagttgcttatcagcttaaggagattttgggctgagacaatggggttttacaaatatacaatcacgtcatctgcaaacaggagcaatttgacttcctcttttcctaattgaatatcctttatttctttctcttgcctgattaccctggcgagaacttccaacagtatgttgaataggagtggagagagagggcatccctgtcttgtgccggttttcaaagggaatgcttccagtttttgcccattcagtatgatattggctgtgggtttgtcataaatagctcttattattttgagatatgttccatcaatacctagtttattgagagcttttagcatgaaggactgttgaattttgtcgaagaccttttctgcatctattgagataatcatgtggtttttgtcgttggttctgtttatgtgatggattacgtttattgatttgtgtatgttgaaccagccttgcatcccagggatgaaggccactttgtcatagtggataagctttttgatgtgctgctggattcggtttgccagtattttattgaggattttcacattgatgttcatgagggatgttggtctaaaattctctttttttcatcgtgtctctgccaacctttggtatcaggatgatgctggcctcagaaaatgagttagggaggattccctctttttctattgattggaatattttcagaagaaatggtaccatctcctctttgtacctctggtagaattcggctgtgaatccatctggtcctgaactttttttcgttggtagggtattaattattgcctcaatttcagagcctgttattggtatattcagagattcggcttcttcctggtttagcttgggaaggtgtatgtgtccaggattcatccatttcttctagatttttcttgtttatttgcacagaggtgtttattatattctctgacggtagtttgtatttctgtgggatcggtggtgatatccctcttataatttttttattatgtctatttgattcttctctcttttcttctttattaatcttgcttgaggtctatcaattttgttgatcttttcaaaaaaccagctcctggattcaccgattttttttgaagggttttttgtgtctctatctccttcagttctgctctgttcttagttatttcttgccttctgctaacttttgaatttgtttgctcttgcttctctagttcttttaattgtgatgttatggtgtcaattttagatctttcctgctttgtcttgtgggcatttagtgctataaatttccctctacacactgctttaaatgtgtcccagaaattctggtacattgtgtctttgttctcattggtttcaaagaacatctttatttctgccttcattttgttatttacccagtcgtcattcaggagcaggttgttcagtttccatataattgtgcgttttgagtgagtttctgaatcctgagttctaatttgattgcactgttgtctgagagaccgtttgttgtgatttctgttcttttatatttgctgaggagtgctttacttccaactatgtggtcaattttggaataagtgccatgtggtgctgagaagaatgtatattctgttgatttgcagtggagagttctgtagatgtctattaggtctgcttgctcgagagctgagttcaagtcgtggatatccttgttaatgttctgtcttgttgatctgtctaatattgacagtggggtgttaaagtctcctgttattattgtgtgggagtctaagtctctgtaggtctctcaggacttgctttttgaatctgggtgctcctgtattgggtgcatatatatttaggatagttagctcttgttgaattgatccctttaccattatgtagtggccttctttgtctcttttgatctttgttggtttaaaatttgttttatcagagactaggattgcaacccctggtttttttttttgctttccaattgcttggtagatcttcctccatccctttattttgagcctatgtgcgtctttgcacgtgagatggatcttctgaatacagcacactgatgggtcttgactctttatctaatttgccagtctgtgtcttttaattggagcatttagcccatttacatttaaggttaatattgttatgtgtgaatttgatcctgtcattatgatgctagctggttattttgcccgttaattgatacagtttcttcatagtgtcgatggtctttacagtttgtcatgtttttgcagaggctggtaacggttgttcctttccatgtttagtgcttccttcaggagctcttgtaaggcaggcctggtggtgacaaaatctctcagcatttgcttgtctgtaaaggattttatttctccttcacttctgaagcttagtttggctggatatgaaattctgtgttgaaaattcttttctttaagaatgttgaagattggcccctactctcttctggcttgtagagtttctgctgagagatcagctgttagtttgatgggcttccgtttgtgggtaacccgacctttctgtctgcccttaacattttttcctttatttcaaccttggtgaatctgacaattatgtgtcttggggttgctcttcttgaggagtatttcattaatttgaacttcagtcactgatatcctttcttccccttgatcaaatcagctattgaaacttgtgtatgcatcacgtagttctcatgccatggttttcggctccatcaagtcatttaaggtcttctctacactgtttattctagttagccattcgtctaatcttttttcaaggtttttagctgccttgtgatgggttcgaacatcctcctttagctcggagaagtttgttattactgaccttctgaagcctatttctgtcatctcctcaaagtcattctccatccagctttgttccgttgctggcgaggagctgcgatcctttggaggggaagaggcgctctggtttttagaatcgaattggctattgaagcttgtgcatgcgtcatgtagttctcatgccatggttttcagctccatcaagtcatttaaggtcttctctacactgtttattctagttagccattcgtctaatcttttttcagggtttttagcttccttgtgatgggtttgaacatcctcctttagcttggagaagtttgttattaccgaccttctgaagcctatttctgtcagctcctcaaagtcattctccatccagctttgttccgttgctggcgaggagctgcgatcctttggagggaaagaggcgctctggtttttagaatttttagcttttctgctctggtttctcctcatctttgtggttttatctacctttggtctttgatgttggtgacctacacatgggattttggtgtggatgtcctttttgttgatgttgatgctattcctttctgtttgttagttttccttctaacagtcagaaccctcagtttcaggtctgttggaatttgccagaggtccactccagaccctgtttgcctgggtatcaccagcagaggctgcagaacagcaaatattgctgcctgatctttcctctggaagctctgtcccagaggggcacctgcctgtatgaggtgtcagtcggcccctactgggaggtgtctcccagttaggctacatgggggtcaggaacccacttgaggaggcagtctgtctgttcttagagctcaaacaccatgatgggagaactactgctctcttcagagctgtcagacaggaatatttaagtctgtggaagtttctgctgccttttgttcagctacaccttgccccccagaggtggagtttatagagatagcaagccttgcagcactttggtgggctccgacaagtttgagcttcccggccgctttgtttacctactcaagcctcagcaatggtggatgtccctccacctgccaggctgctgcctcgcaggtcgatatcagactgctgagctagcagtgagcaaagctctgtgggtgtgggacccaccgagccaggcgcgagatataatctcctggtgtaccatttgctaagactgttggaaaagcacaatatttgagcaggagtgtcccgtttttccaggtacagtctgtcactgcttcccttggttaggaaagggaaatcccccgaagccttgtgcttactgggtgaggtgacgccccgccctgctttggctcgccctctgtgggctgcacccactgtccaaccagtctcagtgagatgaaccaggtacctcagttggaaatgcagaaatcacccgtcttctgcgtcgatcacgctgggagctgcagaccagagctgttcctattcagccatcttggaacacgcctccttactagagttgttgaaagatgttcagaaaagagattttgacaagaacttgaagaaataaaaggagcagaagtttaagtcactctttattcttgtgtggaagtactaaaaaatttgaacttttgggttcaaattttgagtcgcgtgtgtgtatttttaaaaatcattgaaactgtcagggcacggtggcttatgcctgtaatcccagcactttgggaggccgaggcgggtggatcacctgaggtcaggagttcgataccagccctgaccaatatggtgaaaccctgtctctactaaaaatacaaaaaaattagctggacatggtggcaggcacctgtagtcccagctacttggaaggctgagacaggagaattgtttgaacctgggaggcggaggttgcagtgagccgagatcgtgccactgcactccatcgtgggcgacagagtgagactccatctcaaaaaaaaagaaaaaaaaatcattaaaactcagaatccatgggaaggatttatatgtagagaatgagtcttgttttgccttgggagaacaatcctggtggaaaaacatctctctgactttagttaaaagtaaaggttaggtgcagtggttcatgcctgtaatcccaggattttgggagtccgaggtgggagaattgcacgaggccaagagttcaagaccagcctgggcaacatttgcaagaccccatcagtacagaaaataaaagaattagctgggtgtgatggcatgttcctgtagtcctagctacctaggaggctgaggcagaagtattgctgtagcccagaaatttaaggttgcagtgagctctgatcacattactatactccagcctgagagacagagcaagaccctctctttgaaaaataagattaagtaaagtaaaatgacaaacactaagctttagtgctcttcttcctgttctgtcctatcgccccaccaactagtaagtctggggaaaaattgcaaggataataatttgaattctctctacttctgtggtttgtaatatagatatgtaagttatatatctaaagtaaaaattatgagatacaacttacactttgtagcataacaaagtagatgcttttatttaggatttattcttcccttccccaaatgtagatgattctctggttgtgttcactctctttgattcagaaagtataaaaataacattttagaaaattaaaatttaagaaacatgaaaatatcaaattctatgaagaaacttttttcttttcatagttttactgcggctattactttttaaaaataagtgcatgtagcaaccccagaaagatgtgaagaaatggtttaatgtaatgtcaaagatctatttgatgaaagttaataattgatagctttaaagttgaaatcggatagttttttttcccccttgtgtgttaaatgtgcttttcttttttcattttaaaatcacaaaggctttggcagagatgaatttatggaggtaagtctcaagtataataggattgcattttaattaaggaggggaatgttgctaatttaaattttgagtgagccattatttgcgtggtttaaaactttggcattgcagccatatttgttccgtttttatattctgttatttggaatcatattttgctttttagcatattttgggggctgagatatgagaatgaagaaaaagaagtggtttattgatttatgagacagggtcttactctgtcggccaggctggagtgcagtggtgcaatctcggctcactgcaacctctgcctcctgggttcaagtgattctctgaccccagcctcccaagtagctgggatcacaggcatgcaccactgtgcctggctaatttttgtagtttttggtagagatggggtttcaccatgttagccaggctggtctcaaactcctgacctcaagcgattggcccgtttcagcctcccaaagtgctgggattataggtgtgagccactgcgcctggccagaaagggttctttttaaactagcaaatgtattttatgatttttaaaaatatagtcaacaggaatctttgaaaacttaatttatgtatctttatatcctaccaaaatctagatctagtatggtctagtatggtcgaccatattgtctaccataaaatgaaaaaagaaaaggcaatactagacaatactagtattgtgtagtatggtagccagtaaccatatgtagcaattgagtacccaaaatctggctggtttgacttgtgatatgctgtaagagtaaaatatgtactagattttaaaacttgatttgaaaaagagactatcttggtaattgaaaaaattttgtttacctgttgaagtgacatttcaactgtatttgataaaataaattattaaaattaatttcaggctgggcctggtggctcactcctctaatggtagcactttgggaggcctaggtgggaggattgcttaagcccaggagtttgagaccagcctctcaagaccccatctctatttaagatatatcttaatatatatatcttatatatatatttttcatcttttttaaaaagcttttaattgtagtgattagaacatttagctttgcataagtggactgcattatatctcttttggacaggctgatctagatgacctaatgtccatcttatatttataattttaccaccatagcattacctcagttttcctgaggatactctccataaaacatccagcaacaccaaggaagtgaagagcttgcaagcaaaatagatattttcaagtctctatttaaaaattcttgtatttttaatcataggaaaggtctgtagatcttcatttgaagtctttgttcttattattttcattgaggattgttttaaatttttttatcagttctctgatttcctaaagaatttgatggtataattaattaaacaatttattatattaccttttctgtggcaactagcttagcctaagatagtctcttgaaattaagaaatcttaagactgaagtcggctaggcttgtttttctggaatgtctgtataaaataatctccatactattagtttctgatcataatatttgggaggagcctataaaccttctccaagccctgatcttaaacacagaaaaaaaaaaattctatttttcagaactagagaaatccctgtcatttaggtatctttcttctgtgttgtctctgagttgtttcctgtcctaattccttgtgtcttctctgaattctctcattgttacagtatttctattgctctgagacatgaatttgtgcttggtgttgttgatgtgaaaggatgtgattcctctctgggttaggcatgtagttttgctatggtctttttgttaccctctaaaattcatgcgttgaaagctaatcccaaaggtgatggtattaatatattgggcctttgggagtctgtaatcctcataaatgggattagtgtggttataagaggcttgagggagtcctttgccccttccaccatgtgagggcccgtaaaggcctccatctgtgaggaatgggtccttatcttatgccaaacttgctggtgccttgatcttgggcttcccaccctccaaactgtgagcaataaatttctgttgtttaaaaattacccagtccaagatattttgttatagaagctcaaatggactaaaataagttttttgttaatcattttccattcttttacctggcaagttgctgcacattcatatcttgtttctttggtgttacattacaaagagatgtttgaaccttgtgtttgaaaagttgcctcctccgtaataaatctctctgccttttttttgaaacagggtcttgctctgtcacgtaggctagagtgcagtcgtgtgatcatggctcactgaagccttgacctcctgggctcaagcagtccttctacttcagccttccaagtagctgggactactgcacttttaagtgccagtgtatttagcttcccaggtgtttgtatcatacagcgtttttcttccttagatcctttcttagctccttataaattatcttagcagtttataaattaccaactggcatgttgaccagttgctgttgtatcctgctttctgagttctggtatccataggaaaacattatgctgagtacaataggatactcaagaagtttaatatcaactgttttcagataattaccagatttttgtttgtggcgttcaccttgcttatgaacttcagatttgtcttttcaactgctgtgcttattgtctacatggattttcccccaagtacttcaaactccaaatactcaaaagagaactcattcttttccctttcctcccttgtattttcaaatcatagtattatagataagcctttttggggggctgtttatcatctgcatgctgccatacacaagctattcttttttcttatatggccatcgtgaagtctgtactctgtcattttccttacataggtggcatctcgataagaagttttgattctcagaagcaaagatacggtgaaggtcatctgtctaagataagaccgaggctgttctccatgctggaatattttcttgttctcaacttattccccagtcccacccattagggaactggaaatgctttctccctacaaagtctaccaaacttccagaagcaaccactcctagactctcgatctttaatactgtttggagtccagttggtatattggcaccccccccccaaccccaatctcactattgtgtggctgtagccagtttcagtggctgcccttggatcaggagctactctaagagaaacctgtagtgacccagttaggagacaggattgtgtgttcccttgttgatagaaaaacaatgtcttatgtcctagtctgtcattctgggagaatgaatgaatttaggcctgtgaattatttactgtataaaagtggaatattagaaatggccaggaggctacacaaacctatagggacaccttagattacaatgtacaatattcctgcttggacagtattctttttctttaatctgtgatagtcagaattcttgtgttagaaggagattatgatgggatgggatgggaagtgaggtgaattattcccccaccatcccccctgcttttttttcgagacaggatctcactctgtcaccctggctagagtgcagtggtgcagtgcaatcatggcacactgcagtctcaacttccggggctcaggcgattcttccaccaaagccccccagtagctgagactataggtgtgcactaccacacctggctaattttttgtatttttagtagagatggggtttctccatgttgcccagtttggtctcaaattcctgggctcaagcaatccacctgcctcggcctcccttttttttttttttgctttgcaataaatccatgtaaggcagtgcacccatgtgatctgggaggaggaaaatatgtgaaaaagttttagatatacttctcactagcccacagacctatgagtaatgctgtattaccattttcccagctgccaagctcaaggctttgtaaattgttgactttcaggcagtgcgcccctcccccaccatgccagactaccttaattatactgaaactaggtggaaacctgtttaaaagccttcttgagttgttcctcatcacgtttagcaataaggaataaaaatgcttgattctaactacatagtctataaagtttacatattcttgaacacgtaaattatttttctacatgctataggaaaatacatgctatagttcactggggagagacttcatggtatcaattcaagtgttactacttctgcaaaatgttccgactctctcacagagaaagacttcttcattataaaaattctaaagtttttctttagagaattttaaaatttgctggaatgaccaggaaatttgaaaaggcaaatatgaagtcatgtttatatcttcctttatttataaaatatgcccaaaataatcttttacaaaaagtaatagttacggttttaaaaagttcagaagggcttacaataataaaatgcagtcatttctcaccgaatttttactatccctagtgccattaagtagataatattttttacaaatattgatgaagtgataaaaattgatgaataatatgcagagaaatgtgtagttcttaagtgtaaagtttgaatttcaaagaatgtatatacctatgtataacccacatacctattaagacttagaaagtttctatcatattagaaaatgtccatcatctcagaaaattcctttgtgtcctttctagcaaccccaccctctgtcaaaacttctcttctacctgttcttttttgtataatggctttattcagatattcatataccatatatttaattcccccacttaaagtttacagttcagttgtgttttgtctactcacagaattgtgcaattgtcaacacaatcaattttagaatttttttcatcactccaaaaagaaactgcacacacattagcagtctatgttttcctgactaccttcactcctactacaaccctcagcagctgctgatctattttctttcttctagatatttcatataaatgtattcatggaatatgtgcccttttgtgactggcttcattaacttaacatcatgttttcaaggttcatggatgtcatagtgtgtatcagaatataattccttctcgtggctggtattccattgtttgggtataccatgtttttttaatccattcatcagttgatggacacttggatttttcttttttttgatatcatgaataatgtttctgtgaatgcttgtatataagtttttgatggatataaattttcatttcttttggatatatacctaagagtggaattgctgagtcatggtaattttgtgcttatcatttgaggaactgccaggctgaagtgcttgtaccattttacattcccacaagtagtgtatgagagttccattgtctccatattctcacaaacacttaactgtttgttatttgtcatctcgattgtaactatcttaatggttgtaaaatatctcattgtgttttcaatttgctttttccctatgactagtgatgttgaacatcttcttatgtatttattggccgttttctttggaaaaatgtttattcagatcttttgtccatttttaaatcacgttattgttgatttgtaagggttctttctatattctagatacaagtcccttatgattcgcaagtattttctcccattctgtagattgtctttccactttcttggtggtagccaataaagtacaaaatgtttttaattttgatgaattccagtgtatctgttttttcttttgtcacttgtagttttggtcatatttaaggctttacctaactcaaagtcatgaagatttattcctgtattttcttctatattatgcttgttcttgaactttatatagatggaatcatatcgtatgtactcttttgcacctggcttctttcgttctaacatctatcagattcatccatgttgatgcacatgtcagcagtttatttctttttattgctgagtagtatcacactgaatgaatgtaccacaatttgatcacttatttttctgaacatttggattgtttctggtttggggctattgtgaataaagctgctatgaactttcaactatgtcttctttgtacatatgttttcattttactgctggaccatatggatatgtatttcaactgtatgaggaattatcaaacagttctcaaatgtgttatactattttgtacttttaatattgatagaattgcttccatcctggccaacatttggtatggtcagtctttagaattgtagccattctaatatgtatatagtttggttttaacttgcatttccattgatgactaaagatgctaacatttttcaagtacttattgaccatttgattatcttgtttagaaagtatcagtttacgtctcttactcattttttaaagtgtggtgtttggtttcttagttattgactttaagagtggttcatatattctgtatactatcttttgtcagatacctgtgtttagacttttttttttcttcttactctctggtctggcttgccttttcatttttaaaatagtatcttttgaggagcacagctctttaatttcggtgaagtccagtttttaaatcaattttttcttttgtagttactgtttccttatgtcctgcaaacaaatttttgcctaccccaaaggctgtgaagaggttttcttgtgtttttttttttttttttttttgagacagagtttcgctcttgttgcccaggctggagtgcaatggcacgatctcggctcaccgcaacctccgcctcccaggttcaagcaattctcctgcctcagcctccctagtagctgagattacaggcatgtgccaccatgcccggctaattttatatttttagtagacagggtttctccatgttggtcaggctggtctcgaactcccaacctcaggtcatccgcccgcctcggcctcccaaagtgctgggattacaggcatgagccaccacgcccggccatggttttcctgtattttgtttttaggagttttatagttttgttatatttaggcttatctattttaaaccattttataagataaagcagggacagtatctttaaatagtgtaatgtcttgagatattttatttgtaaacgttcctcacagctttgtataattggatgtgctatttcaatgttctcggaaggttaactgcttaatcttctctaacccacgaatgccacgaattcacttgatatttgtgcctatcctagaagttgtattaataactcagcaatccaagactttttgactctctaaaagccttctgtttaggtgcttcttcatctatacttggattacacctcgaacttaggtttaacttaggaaaaccattattttctttgaactgcatatctctgttgatagtgatgcaatttaattgagatgtagcaagcagtcagtaaataagtatggcaaataactaggattcaggttatttcagtaaaatttgtttctttattgcatttacaattcttagggtttagaatcatgtggaaaattacctatgtaaactaatttttccataagatatattacggacttactgaaataatatgtattttaaaacagtatttaaagtaaaacatcatcattaattctttttttatctttttattttcctcagagaccttgttctgaaataatttttttcaagtaaaattatttataataattagttgatgctcactttggctgtttggtatgtttttatgtttttagcaatatttgggaaattttattttaattattgttgccatgaaaatatattaaattttccttcagtaaggatagaatttgtttgttcagtttatactgttgtattattgaaaatgacatacctggaatttggaattttaaaatttggacttatgattttatttcattttgataatatactttgcattgagctaaatgttctaagggatataaagatgagtagcatataaatctggctctcaaagggtggttgtataatctgttaaataggatttgacctctatatgtttattttctttctcagcttttgtattttatgaattagtattgtgagcttttgttgtagcctaagcagatgacttttcctgaagaattactggaagtgagtagtagctatataaaatagtgatagagctacgttttccaccttccttttataaataaaagacttaatgtagtgattagtcatggattggatcttggaaattatcttaacccttctttcaacagataaggaggaggcctaacacagggttgcaagctcaaaattcaacagggaccttatgagtgaggaggtcccagtttaacagtgtaaacctagtaataaatagcagctgttagctggcctgagttttaggggagactgtagggattatggaaagtgagcagattaaagtccttctgcatttgaaggaagaagctcccacgcagctatatcctgttcttactgtgcaggaatatggaccggttttgccttatctttttatttttcaagagaatctagaattataaataaagtataaatgcatataagcaaatatgtgaaatcctccaattttagtatattagtaatagctcagtttttacacaaacactgcataggccaaataaatactttttgtttgggcagattggttatgcatgtgtgaagcaaaatgaaaaaagagaagtgatttggttaattttgggggctctgccttacttttaagccttagacacattgtaaacgttttaggattggttatttcatagatttgttgtacctcttccaagtataagttcttttttcctgaagcctacccaaatacttttctcatcagatttcccctaatttgaatttttaatggagatgaagggaaattataatggggctagtagctcaaaaatttttaacgtaatttgctttttcaaattttcaaactgctataataggtgaaaaaaatatagcagtaattttattgatgtgaccaaaatttatttaaattatgtatattattaaaactatattttaaaacaatggttaaattgcagtaataaagctctaagtatcatcaatgcctcttctaatatcactgtccgattagatcttgaacagtttttaattatattttagattgttagaaacggatagtaagtctttaagatctgtaaatgggtcaagaagaaacagtggctcttctcttgtgtcgagttcatcagcctctagcaacctcagtcaccttgaagaagattcttggattctttggggaagaattgttaatgaatgggaagatgtacgcaaaaagaaggaaaagcaagttaaggtattcatgttctttgttgaagttcttattcttattccatagtgcgtcagacataacttaatagaggattgggaaaaaaaccccaaatacaacttccaagctatatattaaagaggtctgctttatttgttttcacttacttgtacccctaaaagttttaatttgtagacatcagttgttacagaggtcctgatcatatagaaatatataactgaaaattattttatttacttattattattttataaagactcactttgttgctcaggctggagtgcagtgatgcagtcatagctcactataacctcgaatttctgggcttaagctgttctcctgcctcaggctcctgagtagctatgattacaggtgtgtgtcaccacacctcgctaattttttattttcctttttgtagagatagggtcttgctttgttgcccaggctggtctcaaactcctggcctcaagcagtcttcctacctccgcctctccaagtgttgtgagctactacacccggcccgaaaattgttttagaaattaaattctctcattttattgattcagaaatgaagttgtgatatcctgcattcttgaataacagtattttcctttttttttttttttttgccttcaacagccctttgaatgttgggtactgtaccatcattcacagctctgcaggtttcaagtccattaccttaagaggtcacacactgaggtgaaatgatcattattaatcccctgaccagaagaggatacacccagggcccaatcttacccttgacttacagggttccctagtcttattataaagctagctttgtgagttacaaatttaatgatgtcttctacttcattccaaccccctaataagtcttccttggcttgcaagataggacacttaaataattcatttttgtaattttattttatttttaggaacttgttcataaagggataccccatcactttagagcaatagtttggcaacttttatgcagtgcacaaagtatgccaattaaggatcagtattcagaactcctgaaaatgacctcgccttgtgaaaaattgatccgaagggacattgctagaacttaccctgaacacaacttttttaaggaaaaagatagccttggacaggaggttttatttaatgtaatgaaggtaagttttatttattcattttttgaaatgaaatgaattcctggaaggttgaaattatacatttttcatgatgaagcatgacctcccaccacaataatcagttgctttggcagtgaaattggttttagcatcatttttgccttaattcttatgctacattactatctagtatagagaacttgttagaacatttactacgttatttagcattagttgatggaaatggaatagcttaaaagtcacatatcatagagggatcctcatgaaaaggaataattcaccatctgtgaagttcaaaacctgggatgtgggtttctcctatcatatctgtgttcctacagtgagcaaatttttctgctttctatggccagcactgttaagagcacttagcccttgaaaggtgtaccattgtcattttttcttcaatattgccatttcccttcccacagttactttttcttttagctacttctttgaaatactgacttcttgttaaatcatttcaatttcgccaatcctttgccttaaacctagtctagttttatatacatcaatataaattttacttgaatttttttttttttttttgagatggagttgcactctttttgcccaggctggagtgcagcggtgtgatctcagctcactgcaacctccacctcccaggttcaagcaattctcctgcctcagcctccctagtagctgggattacatgcgcccgccactacgcccagctaatttttgtatttttagtagagacagggtttcactatgttggccaggctgatctcgaactcctggcctcaggtgatccgcctgcctctgcctcccaaagtgctgggattataggcatgagccactgtgcccagctcaattttacttgatttttaagccctgttacaaattcctttattttattttattttattttattttattttattttattttatgtctttagagctagcaagtttggattgggaaattgtcaaaataaaatttcatgtaataaaacatttgctttttaaatatgtataggataacatctataacaagcaagcaagagcttttctcaaaaataaatgttttttaatctgcctgtcttgccaattttaggttttttggagaaggaaggtataacttaccatgtattttgaacaacttttttttactttttaggcttactctttagtagatcgtgaggttggttactgtcaaggaagtgcttttatagttggattgttgcttatgcaggtaagttaatataagtattaaatgtccaatgaaattttttattaagttggattggagagtttaaaaagcatctttgttttattaaatataagtggatatgggtattttttcctaggcataatttgaatacaaatatttagtttgcattttaaaagattaaacatgttaaaataacatacagtaggccgggcgcggtggctcacgcctgtaatcccagcactttgggaggccgaggcgggcggatcacgaggtcaggagatcgagaccatcccggctaaaacggtgaaaccccgtctctactaaaaaatacaaaaaattagccgggcgtagtgacgggcgcctgtggtcccagctacttgggaggctgaggcaggagaatggcgtgaacccgggaggcggagcttgcagtgagccgagatcccgccactgcactccagcctgggcgacagagcgagactccgtctcaaaaaaaaaaaaaaaaaaaaaaaaaaaaaattaacatacagtaatatcttaccaccaaatgaaatttcaacttcatgatagatacatttttactgtaatattctactaaagcttgtatctacagtagtttaaaatcttatttgttaacatttaatgaagagtaatctttttctaaccaaggaggaaataattaaagtgttggtaagaaaatcttatttatattgtacaacatctttagagatttatagagaatttaatttatcatggagctaaaagcttgttatgcatacctcactgcatgccctaaaatagtggtactcagccacttttaccccctagggatataactttgttattgagtgtgcagtgggtttgggtggaatgttttcagaattcgggggtaggataatcatagctttgaagggaaatggcatatagtattatctcttcagctttgttgaaatgttaagtccatcttactctttatttagtctcagattttagtcctgaaaaggaatcatggagatacttggtttgagtcatatagggtggttttgcaactcagttctgcacatgctgtatgaatttaggctagattatttaacctctctctgagccttagtaagataatactatctactttcagattagttgtgagggttatttgaggtaatgtatgtagaagcctagcatggtgtttggctcataggagataggcagtgaaagttcagtggcttacccaagatcacacatcctggtagataaaagcaaagtaggaatcagaaaccgtttcctgatgctttgcttcagcttcccaactgctttgagttttaaagctcttgttgctgtcaggagtatacacttttctaagtagaagagacctgatgtcagagacactgatttataataaaaataatttttactttgtgttacagcatatataagaacacataagaagtgctcccagtggttattgatttctaagtggaattaggttataaataatacaatgcaaaactagatttgttaatgttaaggtatagttgtttaacaaaattatgattttccagctttgcgcagtggcagtatcgtagccagtgaggtttatccgaggcgcaattattgctaattgaaattatgattttcctactttatttagtattggtagatccttcattattgaactcagacatccttattatcagtctagtgatttttgctgctgttctattccttttattttcctgttagctccacaataaccttttagtagtcatttctcttgggcatctaaagagcagtttttctctgcttgaggtctgaatctctcaacagctgacctagctctctaggaatcctgtggatcctgtgaatcctctaggaatcacagtttccttcaagacagggcaagcagtggtggtagagatattaacttcaataagtattattaccaccattggagtaataaataatattttggtgattgatctacttagctgttgtcagtggcagcagtatattaacacaagaacagtagtcacttatggcccagggccataaggtagaaaagctcctctttttgtttctaaagtttatgccgacaccttatgctatattctcccataacttcagtttagaaatgtaactcagagagtctgataaaatttgcaaaattagtacatactttatcaaaatggttagaagtatgtatgttttgtatatatctcactcctataatattaggtatattgtctgcattagacctttgcaaaagacatggattcttatcagctcagagtcacagagaaagttatgtagcagcacattgctctaggactcaagtgtcttgatttctttctaatggaaaggaatgactataaaacaacttggtgtatgccactccgtgtcacattttttcattttgtcaccatggtttcaatttttttgagaaggacctagtgatactttttctgtctccttttcctcttttgtcaaattacctcaacttattttttaaaatgttgccattaaaaaaaattctcctctagttcccatatcaatgctattgcaaagaggagagggaatgaaacttgttttgatatgttcagaagagaagaaattgttgtaagacaaaaagggaaattataattacatactgcataatgacattttggtcaacggtggactgcatgtgtgatggtgcgcccataagattataataccctatttttactttgctttttctatgtttagatacacaaacatgtgccatcatgttacagttggcctacagtattcagtacagtaacatactatacaggtttgtagcctaggagcaataggctatatagcatatagcctaggtgtatagtaagctatatggtataggtttgtgtaggtgcactctatgatgttcgcacaatgattaaatcgcctgaggacatatacctcagtaatctctgtccccttccagtgctgtgggagagaaaagagaaaacaactaccttaggagagagccaggtttcagtgttgaaatattcttaggggagatacagatttcagctaaagaaagagaggaacatttggaaaagagattgaggatataggtagactattctgttgatggtaggatatgggttccagaaaatgctgtggaaaagatttaggaaagattggaaatggggtcagattaggagaacagtaaaatcatttaggatgagagtcctgggatttggggcttctcgtagtgactgacataattcagtggggctgtggggcttgatagaattaatagagatagtctcctaagtagaattgtggccatctgtgttgagaggaaggaagaagtgcaggttttgccaagagtgactcttggccccctgtccgtggctgtgtcaaggccaggaaaaatgtcttgttattagcagcagtcttcagtaagaagaaggcctggagatcctttgggatgttctcttttgaaacacactggtataacgggaatgaatgagaattagcaaattttattattttgagaaagatggtttaacaatttggatagttatttgcctaagtattctgaatatctttgtagctctttacagagctttcacattcattatcttatttgatatgatttcctagtgatttacacataaaatgtgaaattggtacctttaaaccccaatttcagataatgtgaaaacttaatttatatgtccttttaatacttgtaccatgtcatatgattttttgctcagaatcctcaaaaatccctctctctcacttaaggtaaaagtcgaaatccttacagtggcctctacagtcctctgcattttggttccctgttatttctcctccatgatgtaaccttcactcatagtattctaatttagtagttctctatttgctgtttcttgagcatgccaagtgtgattccattttaggacctttgtactctttggtcttctggaactgttctttcctcaaatgctcccttgctttcttcaggattctgcttaactgttaccgtatcaggggacctttcctgatctatatcaatagccgtgtgtctccccagcattccctactttattttatttctgtagcatccatcaccatctgacatatatattagttgatttattccatgtcttgtctgtctccctccattagaaattcaggttccttgagaatagagattgtgtttattttgttcactggtgtatacccagagagagaaaagtatctggctgtaaatcagtattttgggttgaattaatgaatgaggcaagttgaggcagttggtttcagaggttgtaagatttgtttaacttctcattcttggtgatagaatgggagactagaactttctgattcttacctcattgctcttaacattgcagcacacagccactcaaacaatgtttatggttggctgtgtacttagtttaaatatcattggtttatttgtgtatcagagaacattaacctatgttgtttttttttcttccaatgtagatgccagaagaagaagctttctgtgtatttgttaaattaatgcaagattatagacttcgtgaactttttaaaccaagtatggcagaattgggcctttgtatgtaccagtttgaatgtatgatacaggtaaaagtgcagtgttgataaaaaggcatattgcctttatattttttatatcttgttctgagtgccaactaagcaaatttaatgttaaaagcattaaagcacttgaagaagtaagtgttttaattacatgattgttttttggttggttaatgtacaatttgacccttcaaattaggtagatcacagtctaggacttgactccagttttcatattcaatccttaagcatttctgccaaatgtactatacaccccttacctaagcacatgaatttccttattatatcctattattgttacgtagtctaagctctcttacaggagctttatgatattacactgacatcagtccatttacttggagactgtctctttgagtcctctcctctgcctttttacttttattttatttttattttttgctagcccgtaattttttttcctgtaatgttttcttatgttgctagtttaagactcaagttatctagtgactgtatgaaggtggagagaataggagcagaatcaaaatcaagggaaaaatacctttgaagtattttacctttctggatttaatttttatattttatatatttaagtttgctataatgtaaatattttcatttatttcaatttcaatttcaattaaatgagcagaatttaagaaaataggtgaatgaatcagctggcatgagagccatttttattagtttcctctctcctggcagccttataaactccagtttttcccatctgtggtgggagcaaggggatatgtaaaatgttcttatattttattttttatttattcatttatttatttttgagatggagtctcgctctgtggcccaggctggagtgcagtggcgtgatgtcggctcactgcaagctccgcctcctgggttcatgccattctcctgcctcagtctcccaagtagctgggactacaggtgcctgccaccacgcccagctaattttttgtatttttttagtagagatggggtttcaccatgttagccaggatggtctcgatctcctgacctcatgaaccgcccgccttggccttccaaagtgctgggatcacaggcgtgagccaccgctgtgcctggctaattttttaattgacatacaatagttgtacattatggggtacatattttttgtttttatatattttaaagaaaaagccagaataggttttgagatgatttttttttttttcctgagacagagtctatctagctctgttgtccaggctgaagtacaatgacacaatcacagttcactgccgccttgacctcctgggttcaagccatcctcctccctcagcctcctggatagctgaaactacaggtgtataccactgcacctgaatagttttttatctattttgattttttattttttaatttttgtagagacagggtttcactctgttgtccaggttggtgttgaactcctgagctcaagtgatcttcctatctcagcctcccaaagtgctgggattacaggcatgagccactgtgcctggacttgagatgattcttaattaattcttttctgaaatagtaagcttgtttttagcagccttaaactctcttaatgttatattttcaattaatgtgtcatttatggctggacgcagtggcccatgtttgtaatcccagcactttaggaggctgaggtggacaggtcacttgagcccaggagtttgagaccagcctgggcaacatggcaaaaccttgcctctactaaaaataaaaaaaattggctgggcatggtggtgtgcacctgtagtaccagctgcctgggaggctgagatgggaggattgcttgagcttgggaggcagaggttgcagtgagccaagatcacaccactgtaccctagcctgggtgacagagtgagaccccatctcaaaaaaaaaaaaaagtctcatttatgttttgaattactagagttgctgaaacatctgtattttgaatatttttcctattctttaggaaggtaagaatgggtgatcagtggtagatagtgcctgaaagtattttaacataccatttattttctttttaaacgtctttttaaaatattataattgatagaagagtatagaaaatgtcagtcactcttgtatccaccaacaggattaaacaaatataaaacttttattcagtttctttttattaataaattaaatgttatactcaaaattccaacttcacattctttcccccttctttctttcctagatactagccactgtcccagatgtttcaatgtctatgtcttaccttttccatatgatgcttgatctaatctgtgtttggtataggctaatctagtataaatataatctaatttaaaatactcagttttactgtgttataactaattattttcttctctttaggagcatcttccagagctctttgtacattttcaatctcagagttttcatacctcaatgtatgcatcatcctggtttctgactatctttcttacaacttttccactaccagttgcaacaaggatatttgatatctttatgtctgaggtaagctaatgggcagacaaagagcaggagctgagcaaaggggtcactgagttagtgagagcagggcaatgaggagagcaatgaaggaaagccatgtgtcccatgcaaaactgcttacatggataatctcatttaaaccttataataaccctatcaggtagatactgtttttattgcatttgttagatgatagatgaggaagttgagacttagagaaaggttaagtagcttgtctatggacacacaatacataagtggtgttgtaaccaggattcaaacataggcagtttggagcctacactgttaatcatacctctttatcacctcctaactcatacagtgaaagttagtgagaggtaaaatttgtcttacagttaatattgttgaaatgcatctgtcatccaaagagtaagaagtaataagcatgtttcttctatgaacacattgcaggttgttgtccttttgtcagtagcacatagaggtaatcctttgttttctagtctgtgaactcaatgttgttattaattacatcttgggaaaatcaatttgtattacctatctaaattagttcagatcacagttggtcagctgtgattcatgtaccaatcagatggacagatttttgtgcgaaatccattcttccacacctgttttttataaagttttcctagaacacaaccctgcccatttatttatatgtcgtgtatgtctgctttagggttgtagtggcagaactgagtaattttgacagacaatatagcccaccaaacctaaaatacttgctttctgactcttgacagaaaatgtttgccagcccctagtttagatccctaaatgtttaccttagtattatttcaaatgactcgtttttgttgatggaagagtaacataaatttggatttatttaatttgtttcctcagggtttagaaatagtgtttcgtgtaggattagcacttcttcagatgaatcaggcagaactgatgcaacttgacatggaagggatgttacaggtaagttcataatttattttctttttttttttttgagacagagtttagttctgttgcccaggctggagtgcagtggcgtgatcttggctcactgcaacctctgcctcccaggttcaagtgatcctcctaccgcttcagccttctgtgtagctggaattacaagcatgcaccactacacctggctaagttttgtatttttagtagaaacagggtttcatcatgttggccaggctggtcttgaactcctgacctgaagtgatccgcctgccttggcctcccaaaatgctgagattacaagcatgagccaccacgcccagcccataatttcttgaatgtctttggatttcactattaacagcactaagtcattcttatgttttttttttaattgtatcttagcactttcaaaaggtcattccacatcagtttgatggtgtcccagacaagctaatccaagcagcttaccaagtcaaatacaattcaaaaaaaatgaaaaagtaagtattttatatttttgttggaaattcagtggaagttgcaaaacattctagtgatacagttttcctccttaggttatagaactatattattttcttcggtggtattggtttcaatatagcataaagctaatgttggaatatactgcttttaacagtggtgcatgggactagcatgtactacctttaaaactttcctccttttccacgttgactagaattaggagcctggaatggatatacatatatgaggatgctgttatttttaaaaccacttttctggtgtggtcccattcattgacattcttttcctcttagtttgaccccacagtgtcacttaagttcaaaattagcataaccagcaagatagacatgaggtatggattgagaacttaaaattttatttatttattttagagacaggcttttgctctgtcacccaggctggagtacagtggtgtgattatggctgctcactgtagccttgaaatcctaggctcaagtgatcctcccacatcagcttcctgagtacaggaagtaccctgtctctactaaagcacaggtgtactacaggcgcacaccaccatgcctggctaattttaaaatttgttttgtagagacagagtgtcactatgttgcccaggctggtctcgaacccctgggctcaagtgatcctcccacctcagcctcctaaaatgttgggattacaggtgtgagccgctgcacctggtcaaatcttattttttgtactactttctaatgaagctttttttggcattcatgtcctaaaagttcaaaataaagtctctgctcattagttttatttttgaaacagattaagtgtattaattaaaataatagctgtgatttctctagcttccagtacttaattcttagcctgcggtcatagttagcatttctgatactgtactttctatggtataaaatgctttaaaatgataacagtactgtatgctagcagttagcagtttttctgctgcaatatgaaattacattaacatgtacaacatactactcccatggatattcctactccacaaagtatatttaaatatgagtgagaattaatgttattaaaattagttagcttttccatgcacaatgatgtgtacctgtagtcccagctactccggaggctgaggcaggaggattgcttgagctcaggagttcacaatcagcctaggtaacatagtgataccttatctcttttaaaaaaattaaaaagttagctctaattgacaaaagcaagccaagccgatttttgagcttcagcttttattaagttacttgtgatgttttaaataaccaccatcatgttgatacgttttaaataactaccatgtgtggagacatcatatagacaaaaagccgctgtgccttgtaactgataaaaacaaattatctcaatttttgtcacttggtaaaaccacattgaactcacactagccaggcagagaatttatttgactttaaaagtctgatagagaatgaggttccttaaccttcttggtaactaattctccttgcatagatcttgtcatatgtacaatccatttctgaaatttcaattaatcctgtttacttatcagatttctggccctctatttctttcacttccttattcgtgctctccccattctgctttatcaagatctctagattgaggtttaaaagccttcttctgatatgaacaactgtgcttcctctgcccttttgtttcctgtattcatgtatccaattgttattgcatagttactgagattgctgacagtaaattatgtttccagtggccttccatgtatatttatattgactttgattaattatctcattcctcacagtggttacttcaaaccttaccattcttcccaaactcccatcccctttttgctatatgtaactctcaccagattaccttattcctaattcagcagtcatttccaaacttcctaaacttgctgtcttccagcttgtagacttagctatgttctttttcttctctttttagaatacagtatttttttttcctttataatgctaattcagaatacgtgatgttactcatttccatctcttccaggtctttgctccattaattattccttctctatcttcaacctctctctctgttgtttcattttcttcaatctaagaagataattttgagttctgacttagaagcaacaaaacaaaaccttcctcaacatagcatttcattttccttttatgaagcttagctgtgaaggaaagaatagattttactcattagctacagatcacattctatttgctttttttcacttgggaaaattttcagacataacaaaaatagaataataaatatccattgcttattgtctgtatttaacaactgttaatattttgtcatatttatttttttcaaagtatttcaaagtaaatattgttaatattttgtcatatttatttttttcaaagtaaagctcagaaattgtgacacttcactctttaatacatcagtattcatgtccataaagtaatttgcctcatttaccacattgcttccaccacttaacagtagttccataatactgcctaatactcagtctatgttcacatttcctcagttgtgccaaaaatgtctttgccattgatttcattgtattcagttgttcacttacatttttaaaaatttagatcagcaccacctattccaatcttcttttttaatatattggcttgttgaagagaccaagtcagttataccgagaatatccaacctgaaggattcatctgattatttccttgttatctcatttaacttctgtatctcttgtgttttctataaactgggagctaatgtgaagacttaatctaattaagtgcaaacatttctggcaagaatacttaataggtgataccatgtactttattcatcttaaaagatgcataatgtctgtctcactgttattagagatgccatgattggtgactaggttaaggtaatgacagatttctttattatgaggttatgttttccctcttggcacccagtaagtactttgtaagttgatactttggcattgtaagaatatccagttcattatgaccttccacctcttggctcagtctgctcaaaagttattattgagggccaggcacagtggctcacacctataatcccagtactttgggaggccgaggtaggcagatcacttgaggccaggaattcaagaccagcctgggcaacgtggtgaaatcctgactgtatagaaaaaaaaaagaccaaaaattagccaggtatggtggtgtacacctttagttccagctactcaagatactaagttgggagaatcacttgagaagtctaggatgcagtgaactgtgattgcgtcactgtacttcagccttggcaatagagtgagaccctgtctccaaaaaaaaaaaaaagtatcattggggatacttttcatgttaaattatttcatttaggataacaaaagcatgattttaaaaatgttattcttcttacatttatcagtcagctttcttcataaccttttcttctttaactgcagctaacttcattctactggaaacacatataaacacttcattatttcagccaggcgtggtggctcacacccacaataccagcactttgggaggcccaggcaagaggattgcttgagcctgggagtttgagaccagcctgggcaacatagcgagaccccatctctgcaataaataaaataagctaaccaggtgcctgtagtcctggcttttccataggctgaggtgggaagattgcttgagtctggagttggaggctgcagtgagctgtgatcacagcactgcactccagcctgggtgacagagtgagaccctctctcttaaacaaaacaaaacaactttattattccctttaattaccaatttccagagaaaagagttagtgggaatggtgttcttttaaattagtctattcttttgcaggtggcattattaacgaattacagcctatattcagaatgttttaaggttgcaaagtaagctgtgttcaacatcacaaaattttgccaaagtgacactaatctatagtctaacccggcagtgtaagagttcttattgtggccatgtgcagtggtttaacatctgtagtcctttcacttcaggaggctgaggcaggcagattgtttgagcctaggagtttgagaccagcccaggcaacatggtgaaactttgtctctacaaaaaaatagaaaaattagctggatgtggtggcgccagcacacctgtggtcccagctactcaagaagccaaggtgggaggatcacttgagcctgggcggtcctggctgcagtgatccatgattgtgccactacactccagcctgagtgacagagtgagaccctgtctaaaaaaaaagtctcattgttctactttgtcatcagtgcttggttattcttaatttttgccaatctacttaatttttaccagtagcagggggcattattaaggacttacaggtttatattcagaatgttttaaggttgcaaagtaagctgtgttcagcatcacagaattttgccaaagtgacactaatttgtagtctaacccagcagtgtatgtgttctcattgtggccagtataaaatgtctcattttccacttaatttacatttccctgattgttaataagactaagcatcttttcatatgtttattggcctcatgtttttcttctatttttttcctcccttttttactgcagtgtctacttcatactgctttgacttgttagtggttactagttgtttatgatctgggttgtaatcttttgtcagcattaaaagataagtcttgtccatttctactaagtatcagttttggaatatataataaactcaacaattggacctacctctcaaaaatgctcaagcttcctgttggttggagggtagcagcacagaaaagtaaatggcttgttagatgcaaatatgtaacagattattaaaattatatgttagagatacctaacccgtatgtcttcagactggcatacacagactgctgggtgtcaggaaaatgttcagagcttggttaagtagactttcaatttctatctatagtctttcctacaatttatctttctgataacatttctgtagtagaggtgcctcggttcttcttcgcaccttcctttttacagcatgccttctcccactttattaaaggaaggaaggaaaacctgtcacccaacctagatcttactatggtaccttactttagtttataaaaaatctctgtggctccaaacaaaatgaacaatttcagaatgacttgctcctgagggagtatcccctgagagagcatcccctgagagagcaaagcaagaaaaatggaagttttctttattattattattatactttaagttctagggtacatgtgcacaacgtacaggttttgttcagctcccacctatgagtgagagcatgcggtgtttggttttctgtccttgtgatagtttgtgtagaatcatggtttccagcttcatccatgtccctgcaaaggacatgaacccatccttttttatggatgcatagtattccatggtgtatatgcgccacattttcttaatccagtctatcattgatggacatttgggttggttccaagtctttgctattgtaaatagtgccgcaataaatatacatgtgcatgtgtctttataatagcataatttataatcctttgggtatatacccagtaatgggattgctggatcaaatggtatttctagttctagatccttgaggaattgccacactgccttccacaatggttgaactaatttacactcccaccaacagtgtaagcgttcctatttcttcacatcctctccagcatctgttgtttcctgactttttaatgatcaccatctaactggcatgagatggtatctcattgtggttttgatttgcattctgtgatgaccagtggtgatgagcattttatcacatgtctgttggctgcataaatgtcttcttttgagaagtatttgttcatatccttggcccactttttgatggagttgtctttttcttgtaaatttgtttaagttctttgtagatgctggatattagccctttgtcagatgggtagattgcaaagattttctcccattctttaggttgcctgttcactctggtgatagtttcttctgctgtgcagaagctctttagtttaattagatcccatttgtcaattttggcttttgttgccattgcttttggtgttttagtcatgaagtctttgcccatgcctatgtcctgaatggtactgcctaggttttcttctagggtttttatggttttaggtctaacatttaagtctttaatccatcttgaattaatttttgtataaggtgtgaggaagggatccagtttcagctttctacatatagctagccagttttcccagcatcatttattaaatagggaatctttttcccattttttgtttttgtcaggtttgtcaaagagcagatggttgtagatgtgtggtgttatttctgaggcctctgttctgttccattggtctatatatctgttttggtaccagtaccatgctgttttggttactgtagccttgtagtatagtttgaagtcaggtagcgtgatgcctccagctttgttctttttgcttaggattgtttcggcaatgtgggctcttttttggttccatatgaactttaaagtagttttttctaattctgtgaagaaaaccagtggtagcttgatggggatggcatttaatctataaattaccttgggcagtatggccattttcatgatattgattcttccaatccatgagcatggaatgttcttccgtttgtttgtgtcctcttatttcattgagcagtgatttgtagttctccttgaagaggtccttcacatcccttgtaagttgtattcccaggtattttattctctttgtagtaattgtgaatgggagttcactcatgatttggctgtttgtctattattggtgtatagaaatacttgtgatttttgcacattgattttgtatcctgagactttgctgaagttgtttatcagcttaaggagattttgcactgagatgatggggttttctaaatatccaaccatgtcatctgcaaacagggacaatttgacttcctcttttcctaactgaataccctgggtatttctttctcttggcctgattgacccctggccagaacttccaacactatgttgaataggagtggtgagagagggcatccttgccttgtgcaggttttcaaagggaatgcttccagcttttgcccattcattgatattggctatgggttgtcataaatagctcattattttgagaacgttccatcaatacctatttattgagagtttttagcatgaaggctgttgacttttgtcaaaggccttttctgcatctattgagataatcatgtggtttttgtcgttggttctgtttacgtggtggattatgtttattgattttcgtatgttgaagcagccttgcatcccagggatgaagccaacttgatcatggtggataagctttttgatgtgctgctgtattcggtttgccaatattttattgaggattttcacatcagtgttcatcggggtattggcctaaaattctctttttttgttgtgtctctaccaggctttggtatcaggatgatgctagcctcataaaatgagctaaggtggattccctctttttctgttgattgaaatggtttcggaaggaatggtgcaagctcctttttgtacctctggaagaatttgactgtgaatccatcaggtcctggactttttttggttggtaggctgttgattattgcctcaatttcagaacctgttaattggtctattcagggattctacttcttcctggtttagtcttgggagggtgtatgtttccaggattttatccatttcttctagattttctagtttatttgcacagaggtatttatagtattctctgatggttgtttatttctgtgggatcggtggtgatatcccctttatcattttttattgcatctatttgattcttccctctttccttctttattagtgttgctagtggtctattttgttaatctcttcaaaacaccagctcctgaattcattgattttttgaagggatttttgtgtctctatttccttcagttctgctctgatcttagttatttcttgccttctgctagcttttgaatgtgtttgctcttgcttctctagttcttttaattgtgatgttatggtgtcaattttagatcttttcctgctttctcttgtgggcatttagtgctataaatttccctctacacactgctttaaatgtgtcccagagattctggtacattgtgtctttgttctcactggtttcaaagaacatctttatttctgccttcattttgttatgtacccagtagtcactcaggagcaggttgttcagtttccatatagttgtgcgttttgagtgagtttctgaatcctgagttctaatttaattgcactgttgtctgagagaccgtttgttgtgatttctgttcttttacatttgctgaggagtgctttacttccaactatgtggtcaattttggaataagtgccatgtggtgctgagaagaatgtatattcctgttgatttggggtggatagttctgtagatatctagtaggtctgcttggtccagagctgagttcaagtcctggatatccttgttaaccttctgtcttgttgatctgtctagtattgacagtggggtgttaaagtctcccattattattgtgtaggagtctaagtctctttgtaggtctctcaggacttgctttatgaatctgggtgctcttgtattgggtgcatgtatatttaggatagttagctcttcttgttgaattgatccctttaccattatgtagtgaccttctttgtctgtttttatctttgttggtttaaagtttgttttatcagagactaggattgcaacccatgcttttttttttgctttccaattgcttggtagatcttcctccatccctttactttgagcctatgtgtgtctttgcacgtgaggtgggtctcctgaatacagcacactgatgggtcttgactctttatctaatttgccagtctgtgtcttttaattggagcatttagcccatttacatttaaggttaatattgttatgtttgaatttgaccccgtcattgtgatgttagctggttattttgcccattaattgattcagtttcttcacagtgtcactggtctttacaatttgtcatgtttttgcagtggctggcaccagttgttcttttccatgtttagtgcttccttcaggagctcttgtaaggcaggcctggtggtgacaaaatctctcagcatttctgtgtctgtaaagaattttatttctccttcacttctgaagcttagtttggctggatatgagattctgggttgaaaattcttttctttaagaatgttgaatattggcccccaatctcttctggcttgtagggtttctgcctagagatccgctgttagtctgatgggcttccctttgtgggtaacccgacctttctctgtggctgcccttaacattttttccttcatttcaaccttggtgaatctgacatttatgtgtcttgggattgctcttctcgaggagtatctttgtggtgttctctgtttttcctcaatttgaatgttgtcctgccttgctaggttagggaagttcttttggataatatcgtgaagagtgttttctaacttggttccattgtccccatcactttctggtacaacaatcaaatgtatatttggtcttttcacatactcccatatttcttggagtctttgttcatttcttttcactctttttttctctcatcttgtcttttcgttttatttcattaatttcatcttcagtcactttcttccacttgatcgaatcaactattgaagcttgtgcatgtgtcacgaagttcttgtgccatggttttcagctccatcaggtcatttaaggtcttctctatagtgtttattctagttagccaatcatctaaccttttttcaaggtttttagcttccttgtgatgggttagagcatgctcctttagctcagagaagtttgttattacctaccttctgaagcctacttctgtcaactcgtcaaactcattctccatccagttttgttcccttgctggcgaggagctgtgatcctttggaggcgaagaggtgctctgtgttttggaatttttagcttctctggtttctcctcatctttgtggttttatctacctttggtctttgatgttggtgacctatggatggggttttggtatggaagtcctttttgttgatgatgcgatttctttctgtttgttagtttttcttctaacagtcagaaccctcagctgcagatcttttggagtttgctggaggtccactccagaccctgtttgcatgggtatcatcagcggagactgcagaacagcaaatattggtgttctgaattagaattcagaaaaaatttctgaattagaattcagaagtagaattgtgatcatggggcagattattaactcatgtttatttgaattgaaaagtgaaggcaacactttaatgacaggaagtaaatgtaatttggctcattggtttaataataatgactgcctttgccagttaggtcctagattagacgtccataaataagataaatgtcacttaagtttcagtggaaaaattttaaagtacatataaattacaactgtatgtcctttttaactatatttacacttgagataaaacaaaatttagaagtctttaaaatgtatatgaggaaacattcttttagcagatacatgagcagaaaaataagaccacaggatggcataggatgatggcagaggaggaagtttcaggtagttctctgaaggagatgatacctgagtacaattttgaagacctttgtttctttctttttttttgagacgaagtcttgcaggctggagtacaatggtgcgatcttggctcattgcaacctcctccaaggttcaagcctcagcctcctgagtagctgggactagaggcgcatgccaccatgtccagctaattttttaaaaatttttagtagagactgggtttcgctatgttggccaggctggtctcgaactcctgacctcaggtgatccacccacctcggcctcccaaagtgctgggattacaggcatgagccaccatgcctggccgaagactgttgtttctaattgctagggttaaattatgcctgcaacagaaaatccctgctgatatggaacttactgaaatacagaagactgacagaatgatatacagtgtaacatccatcagtgaacgtgccatgaagaaaacaaagccagataaaggacatggagagatgagcactcttttagacagggcacgcagagatagggctcacaggccggtaagatactatttgagccgacaccagagggaagtaagagtgcgagtcatgggattatctgggggaagtgtgtcctacagtacaataacagtaaatgtaaagactgaggcaagaatgtgattgatacattcaaggaatagaaaaccagtgagaggccgggcacagtggctcacacctataatcccagcacttggagaggctgaggtgggaggatccattgagcctaggagtttgagaccagcctgggcaacatagtaaaaccccatctctgcaaaaatgaaaaggaggaaaaccaatgggactgtagtagcataggcaaataggagtgtggtgagcagtgaagtcagaaacatggtagggtgctaggggtatttagagcaatgccatctactgtggtagccattacccatatgtgactatctagtctaaatatgattaaaatttatttcatcagttatatttcaagtgctaattagtcactcacatgtggctaatggctactctattggacaatacagatctagcacgttttcgtcattgtcaaacgttttgttggttattgtcctcctcatgggccagactttttccacatctgaggggaaaccagtagaggattttgcgaaaagtgacatgatctggttttaaaagttttactctttgctgtaatgaaggttggccaggtgaagagaaggagggcattttaagaagaacggtaataggtacaaaggctcataggttcccttactacatgacagttgtaagagttgaatcttagcctttgacttttttttgatgaatttttacgttggtatacttttaaacttaagggggtacgatatactctttaccaagattcaccaattgtttacatttcatcccatttgctttattatcctctctcctctgtatgcgtatataaatatagtgtgtgtgtgtaaaatccattcccattttgggggaggtccatttgagagtaaattgagatattgtgccctttatctgtaaatacttgaatgtgtacttcctatgaacaacaacttttctctcctttaacataaacccagtagttaatcaaaacaaggaaattatattaggttggtgcaaaagtaattgcagtttttgcattactttcaacggcaaaaaccagttacttttggaccaacctaatagatacaatactattatctaatccacagtgtatgttcagattttatcaccaatatatgctgtatatatgctgtcccaataatatgctgtataactatctcccccaccctccgtccagggtccgctctaggatcatgtgtaggatttaggtgttaatacctatttggttttctttaatctgacatatttcctcagtttttgtgtttctgatatatttaaagagtgtacaggccaattattttgtagaaaatctcaaagtctgagtttttctgggatttccccaggattagattcaggttgtgcatttttggcaggtatacccctgatattatatcttctcatttcaccatacgatatatatgatattactttctctcagaactggtaatgttagctttggtcacttgattaaggtgatgtttgctgggttttactactgtaaagttattatttccccttttgtaataagtaatttgtggcaggctactttgagattatgtagtaacctctttctttaccaaacttaaccataccagttttatatccatttatgattttcccactccctcattctttatttattaatcagcattctactgtaaggaagagctttcccttcaccctcatttatttattcatttatttacatcagtgtgaattcatggattattttattcagtgagctataatccattactattaaattatccctgatttgtccagtgggaacccttgcaacctgggtgctttgttcttttgatattttccccattattctttgggaatttcctttctttggggcaacaaaatattccaggttcaacttataccttcttggctcctgcgcagtaatgagctatttctccagagagctttgattacttttttgtaagcctttgaaatttagtctgaaggtgatgagtaaccactgacacgctgggtgtggcgtgatccaaatcaacattttaaaaaaagatcactctgttaatagtgtatagaaaatattgagttatgaaactggccatagaaagaacaattatgagtattttccagtaatttagacaaatcataatgcgggtctaaaaacactatcagtgaagggggaacaaataactttacactggaaaaacctggtgtgtactccttcagccagatgatcaaggtcaacatcaatagtgatgttctgttgatagtttgtacccttagtatgagacaatgaaaacggcatttatgtctgtggtcttcctcctgaaaacccaataaccccagtataatcatgagaaaaacatgagacaaatcccatttgaaggacggaatggtcccttttgaagatcacataatgataactacaaaatacctgaccagtactcctcaaaactgtcaaggttctcatcaaaactgtcatgggctttaggtaacagcaatgtgttaatattggttcattaattataacaatgtaccatactactgtaacatgttaataatagggtaaactgggatgggatacatggaatctctgtactatcttcacaatctttttgtaaaccaaatatttttttttaaattaagtttattgaaaaacactatcagtggagttaaataagtagggtttatttttaggtgtataaatgagtgatatttttacataatgcataatgataactacttcagagtagtcatttgtgaaggctataaacttatttcagtagtgcagctgttgaaaatgttttgcagctctttggagtctttaataaattctgtcggctatcttatagtcttttaagacagtggtccccagcctttttgacactagggaccgctttcgtggaagaccatttctccacttatgggggctgggggtatggcttcaggttgaaactgttccacctcatgtcagatcatcagtcatgagattctcataaggagcccgcagcctagatccccagcatgcacaattcacaatagggtttgcactcctttgagaatctaatgctgccactgatctgacaggaggtggagctcaggcagtgatgttcacttgcctgccgttcacctcctgctgtatgacccagttcctaacaggccacagactggtattggtccactgcccaggggttggggactgctgttttaagatacactttagtgagagacagagtaatgtagcagtcaaatctgtgactatacagaagtttctcaagctttctaaaccccagagtgggtataacaacttatattaaaaagttgttgtgagctaaatgagataagtaatagatttctgtcctttgagggagaattttatttttgaaagcagctgtaagttatttggagcctggtctggtttatatttggagtaaccttggtattgatattttttgtcaagagcaagataaaaaaaatttggtggtactaatttttgtgtggcctatacatttttataaaggtaaatttagacttaccatagagttgcatatcgtgcttactctcctccaatcagtgacagaccacagagatgatatgcccttttcaggacatcttttttcttttaaaaaaatggtttatcactttctgggcgttgcagggaagggtcccaggctggagtgcagtggctagatcatggctcactgcaaccttgactttcctggctcaagcaatcctcccacctcagcctctgagtacctgcaactacaggcatgcacccaccgcacctggctaatttttgtattttttgtagagactgggtttcaccatgttgcccaggctggtcttgaacccctggcctcaagcacttggccccccttggccccccaaagtgctgggattagaggcatgatccaccgtggtcagtgtcatgttttaaattatttttactttttaataattttgacctttattttaaattcagggggtacatgcacatatgtatttcatgggcatattgcatgatgctgaggtttgagatatgaatgatcccatcacccagatagcaagcatagtacccaacggttagtttttcagcccttgtccccctccctgccttcgccttctattagtcctcagtatctgttgttcccatctttatgtccatgagtacccagtgtttagctcctagttgtaagggagaacatgggtttttggttttctgttcctgtgttaattcacttaactcagtacatcttaacaggggtgcatgatgtcagtatgtattactggtgatgttaaccttaatcagttagttcaggtgcagtctactaggattctgtactgtaaatttagtattttcctttaacacttactaaatattttaggagagataatttgagactatgcttaaactttcacccactaattttagcatccattagtggttcctcccgcagtagttattactgaggaattctaatggtgatttttatattaaccttattcctcctatgtctattaattggaattctataaggaagagttgtcccctttccctcattaaaattttcaaagtcaatgttggtaccaggatttttaagttaagagccagttgaacctacaggtgtgttttaatttgagaaataagaataatggttcatttgtaagtttagggctgaaaagaatctgtaaactaagttgcattttgtgctttatacatttcagtttgtaaattttctttttgtgtggtttttatttttgtcatttgtaaagtgagtttttaataagaactcatgaagccacatgatttttctcacatcaaatatctccaagttataagctagaagaaactaaagaaattgtattttatgttcatatgtatttttaaattttgtaatttaataactacttttgaatgaaaacattacctttaactctttttttttcctttcttaggcttgaaaaggaatacactacaataaaaacgaaagaaatggaagagcaagttgaaattaaagtaagcagttgggggctttttaaagtactgattgattgaaatcaattattggacagtagatgtttaaagtttgtacttcttatattcataaatgtatttaccatcctactagattatagttaaaaatagacatttcaaaaaagcagaataatgcgactgaagtggctttcattccagtatgaaggagagcaagctcttccctttttctagatttgttggtggctcatcaggagaaaacacttccatggagaagaaaattatcattccatttaagcatgttttttaaagttgcagagaagacaatctataataacactttctatgctgagaccaacaagagtgtaatctcaggcaaacattaaatagagcatatattacactagaactaattatggttgctctagagctgcagaaagctttgactgatacgactttttcttctctaagcaagggttatacttttgaactactcctctccagaaaatcaagcagattttcaattcgaagggcatataaataccctatatgtaccctaaaaatataaaatttgtacccccctccataaaacacggaattcttgaggtgagggtctgtggcactgttggagctgggacttgagaaaaattgtgttgccttttatgctgatattgtaggatggcgttgataagtggaagcatgagtcaaagaacttagtgattggccaattcactttctaatctctttattcccctccaccccctacccccaacccctggagaaagggttaaaagtaaaataattttagtggagtgactccctcctccctttttaaactttgtgtttgaatgtgtctgatttttgacttggatctggcgagacattatatgaccaccttatttttctccttttacaaggaaatgggttctgttaaactaatactctttcctgccttggtcctcctcaaaagcctctagggagacagtctctccagttttcttatgttaactctctcttatcaactctcctcccttttctagaggttctattcccatttctgtcaccttttccttatcaaatggaagtagatacttccacattttttatatatatagaaaagacccctgtggatgttttttccttcctttttttttttttaattctgtcacccaactgctgctctgctatttgctttgctttttttctttttctttttttttttttttgagacgaagtctcgctgtatcgcccaggctggagtgcagtggtgcgatcttggctcactgcaagctccgcctcccaggtgcacgccattctcctgcctcagcttcccaagtagctgggactacaggcgcccgccaccaagcccgcctaattttttgtatttttagtaaagatggggtttcaccgtgttagccaggatggtctcgatctcctgacctcgtgatccacctgccttagcctcccaaagtgctaggattacaggcgtgagccaccgcgtccagccctatttgcttttcttttaggtactatgagtaagggtacttttactgcaagtaaaaagtacgtcatcctgatgagtggggagagagtatgagttttcacatactacgaatattcggaactgcaaatcaagaatctgaggatggggaagccatcctgttcatttcaccacactatattattgaaaaaaaaatcacagttctatgaacaatccttactcttgaagaaatttcttataaaattaagtacatgaatataggaataccaaaaggcattttcagaaaacagatttttagcagactttcacctatacctgcagtattttcttttcttttagacagggtctccctctgtcactcaagctggagttcagtggcatgatcttggctcatttgcagccttgacctcccgcgctcaagcgatcctctcacctcagcctcctaagtagctgggactacaggtgcacaccaccatgcctggctaattttttgtattttcggtagagacagggtttcaccatgttgcccaggctggtctcgaactcctgagtgcaggcgatccacctgcattggccttccaaagcgctgggattacaggcatgagccaccacgcccagccatttgcagtattttctatactttgttttttgaggaaatatatagttcatatgcctgaagaaatgtttttgaatctagctccatgtgtctcaggcagttggcataaaattgtctatagagaagaatcggaaaaaagagtttagaaagttagtggaacatatcaggtaaataaagtgctgatctcaaaggtagtctgttctctttttataatattgtttccatgtagttctttcttataccattttcatctctttcttcactccccagttccaccagatagaaaaaccaaaacaacttttgaatgactatactttttttaaacttcatatttaggggtgtctgatttttttttcaactgaatacttttttttttttaattatactttaagttctgggatacatgtgcagaacatgcaggtttgttacataggtatacacgtgccatggtggtttgctgcacccattaacccgtcatctacattaggtatttctcctaatgctattccttccctagccctccaccccctgacaggccccagtgtgtgatgttcccctcccctgtgtccatgtgttctcattgttcaactcctgcttatgagcaagaacatgtggtgtttggtattctgttcctgtgttagtttgctgagaatgatggttttcagcttcatccatgtacctgcacaggacatgaactcatccttttttatggctgcttagtattccatggtgtatatgtgctacattttctttatccagtctatcattgatgggcatttgggttggttccagggtgtctgatttttttacttagaccctgacaactcattctaatcatgatcagatgaccaccttatttacaattcattagccaggtataatattaattgagccttgctgtaaaatgggaaatgctacttcttacacacactccctccctcccgcaaaagtctcttttacaagagaatgggttctggttgtaaactagtactttcttgccttggttctttttaaaagtccatgggaagatagttttgtgccattatttttacagcccattggtatgatcatcaaattgtttgatgttttgatatggaagtataaaattagcctttgatgttgtgaaatgtgtttataaggtctctgttgtttttactttaattaaattataagacctttggggtgatgaccttctattctaagaactatatctgtcagtgagcccccggttaagatgcgacttttaagtattttttcacctcttccctaaaagtgttataggaagattttgataataatgtcttcatatggaaaatcttaaattttgcgtgtgaaattttttgttaatagaaacatctttatcagtatcttcttccagtctattgatgttctacctgattgggaggaggtgaaaaatattaaaattctagtttggccgggcgcggtggctcacgcctataatcccagcactttgggaggccgaggcaggcagatcacttgagcccaggagtttgagaccagcctggacaacatagcaagaccccatctcaattttaaaaaagaaaaaaattataaaactaaaattctagcttatattagggtaacccacaaatctttaaaaaggaaaaaaactttgattctgatagacatacgaacagttaatctaatttttatatttaaatttgtgcttcgggatgcagagatctaaagccctaaaatgagaagtatgagaaattctggccagtttttagtcaaaagtaaagtattttttcctgtttaaaaactatggtacatttcagatatgctgaaagccagaaaataatataaaagtgctcacatattcactgcctggcataaaaatgaaaaaaaaaaaaaaaaaagagaagtgttatctaagttgcccaggaattacattttaacaatcaatgtgaagtattagaattgaagctcacatttatttagcccttaatatatgatgggtcacttacatgcattatttccccttattcttaaaacagcattattaaagggttcttatccttacctgtgaagaaattaggcttcagaaagctcaaatattatgccagtggtcacattgcgaggaaacagagtcaaggatttgaagtctgatttgtgttattctaaggcccatgtgtattcttcagtatatacactgtgctgctgctgctttccaagagagactttgatatatttgtgatgtaagatttggatgcccatttttctctggcatatcaaacttttcattaaaaaaactaatggctacataatatccaagggaggtatgctagcctgatttattcaataacacttcatttaacagataattcatagtgcctcctagatgcccaagcactgttctaggcacttgaaatgtggttatgaagtagaccatgatctgtcctcatggagattatattttaatatggaaataacaataaacagaaaagtcaaatgtacggtattttggatggtgataaagtcttaaggagaaaaaataacctcagggaaagagaatgtaaaatggtagtgtttgggtagaaaatttagagaagttaaccaggtgatttttgaaaaaagacctgaaggaagtgatgggactagatatgtgactatctggaagaatggcagaacctattcggggtgtgcctggtgaggagcagtaaggtggcattgtggatgggacagcatgaatgatgagaaaagtggtaggaagtaagatggagcaggttgcagataatgtaggatgttgtcgacagtggtaaggactttggcttttactctggttagatggcagttttcagcagagaaggacaaaatgtgatttaagttcagtagatcattctggttgctgtgttaagagtaaattgcagggattgagagcatttctgatgaacgctgatgtggtaatgcagacaaaagatgatggtgggccaggcatgcctaccatcagggtggcttatgcctgtaatcccagcacttagggaggccaaggtgggcggattccttgagcccaggagttcaagaccagcctgggcaacatagtgggcccctgtctccacaaattttttttttcaaattgccaggcatggtggtgcatgcctgtagtcctagctactcaggaggcggaggaaggaggatcactagaaccagggaatttgaggctgcagtgagctgtgatcatgccactgcattccttcctgggtgacagagtgaaaccctgtcttaaaaaaaaaaaaaaaaagatgatggtggcttggactgaggtaagaagtaattggattctgaatagatttcaaatataaagtggacagctagaatgtagagatgtgtgaggaggaggaaccaagccttgtggtctgagcaggtagataaatggtgttcccattacctgagatgggaaagactccagaaggatttggtttagtggggataccaggagcccaattttgggtatcttgggaatgagatgcctaggagatgtccagttagcttcttaaatattcagatctgaaattaaaagaagccaagctcaaaatataaatttggtagttattggcggggtcatagtattgaaagccatgagaatgggtgagattacttgggaaaggattgtagataaaatagagaagaattcaagaattgagcctgagaataaaccaacatttaaagatgaggaagacaagtagaaagtagcaaactaggagaaaaccaggtaggtgtagttcccagaagccaagagacagtgagaaagagagaaggatttaccatgtcaaatactgaagagtttttgtgaaatgaggatggagaaacgaccattgcattttccagcatgattataatttatcctagaaacgagtggagcagaatggtaggtactaaaacctaactggaatagaagaagaaaaattagagatatttttcaaggaatttactataaggataaaagaaatgggacagtagctagagagggtaattatgttgaattttttgtttctgttttctgtttttttttaagataggagaaataactgcatgcttttatggtgataatcaagtaggaaaaatttatcattaagaatgggggataatcactggagtcaggaagatacggaatttagtgcgaagttaggagatgtaacttagtatgctagcatgagtagttaatacacaataacaagaaatcaaaatatatgggcaaaaatgcaggtaggatgtaggatgtggttttgggagcttgtgaaattctcttctaattgcctcagtttttttcagtgaaatcatatgccagattatcaactgagagacaatggattggagggttgctggtttgaagaaagaggaataggtatgaaatagtgacctagggggatagaagaaggacattattattgctaagaaccatattgaatttagtgatcagtaatttaaataaacgtcatggttttgtttttgttcagtcatatttactggcataggtacagactcaaaattgtcagatagttgatccagagtagtgttttttccaggcagttatactacgaagggagagaagggcaagggggcttaaaagcaagggagccgtataatgattgcaaattaaactttgtcaagaaggaatagagaacatcaaggattgagggacagtgaaaagttgttgggatcactagactgtctcagtgaaaacaattgttggggttgggttactttgtaaactgagtaagctggaaagaataggaaatagtgattgaagagtgggttatttgaaatgagattatcctatttcaggatataaggttgttttcagtttttcttattaaaaataatgctaatggttaacatctttgtatataacaagttttttgtctcctattattatttccatagccagttataaaaagtagaattaataagttacaagatattagcattttaaagacttttgatgtataatacgtaaatttcctaaagaatgtgtccagggtatgtttgtcttagcaacaagtttccatttaatgactactttgccaacactaagtatttcattcttgctctcacttttagtctcttttttttctaatttggtaggtcaaaaaattgtctctattttctttttcaatgtacaagataaacatttgtatgtagctatatctaggtatcttcctctctgtggttttcactttaaagtttaggaagcactctattctagaaaatgtgaggaagatattgaagaattattgagaatcaatcaggtggtagattttagttattaacctttctatgtatcgtcaataaacagttcaaaaatatactggaagaagttccatttgaaataaaaataaaagtatatctaggagtaacctaaatgaaaaatagaataggacctaacaaacactggaaaactttacatacagacattttaaaaagataactaaagatagacaaaaatagctccatgttatataaagatatgaatttcccagtgattttttttttttttttttttttttttttgagacagagccttgctccgttgcccaggccagagtgcagtggcatggtcttggctcactgcaaccttcacctcctggattcaagtgattctcctgcctcagcctcctaagtagctgggattacaggcatgcgccaccatgccaggctgatttttgtatttttagtagagatggggttttgccatgttggcctggctggtctcgaacttctggcctcaagtgatccacctgccttggcctcccaaagttctgggattacagctgtaaaccattgtacctggccctcaaattcagtgaaatttaattccttgtaaaattccagggcaataaaaaaatcttaagaataattctaaaaatagacaaaagtagtaaaataatattcatgcctaacttcaaaactattgtgggcagtgcttatcattaactgagtatttggcatatattaggtgctatgctatctcatttaatttttcagttccctgtaggtttgattactcttaatttctggatgaggaaatggagattctaaaacattgaatgtcatgtgcaagtgttaattgtagaatgagaatttgaacttaaatctgcctaacttcaaaacctagtctcttagctactttagtatactagtatttggggtttgggaacaataaacaaatgtaagaacaggggatattagctctactaggtattaaaacagatagcaaagctataattaccaaaatactgtgatattagttttaaaaaaagaagacagtaacacttgaaacgtaaaagtaaccctgaaatggtctgtattaactgaaaaagtctattgatcaattcctgatgtaaatattatacaaatgaggaagtggtgatttattttttaaatggtgttaagcatttggttagttgtttgtgggagaaaatcaatttagatttttatttataatgaaatagatttcagaagccgtaaaaggggttggggaaggaaatccagatgagtgttttcagttctaaattttattttagcatgatttctgtcataactttattcactcagttgtctggtgggaacttagttttctaaatcttttaagataaaacattaccttttgttgatgaaatatgattgagaacattttgagaatcccatttatttctttggctctctagactttagcagcatttaataattgcttatttgtgtagactactatgctgcacacagtaggaggagccaagacataagaacattttctacttctcaagctgttattttgtctgagattagttattaactttcctgtatatcataatgtctatttcagatcatctgaattttagtgaatagaacaagaaatctaatttgccaagtatctttgtaataactctaagatttgtttcaatttgtgatccactttaataagatgcagtaattcatagagtctctcatttccctgaactaatactttatatgttatataaagccatatttaagtctttactggcaaaataataggttgaattgatggaagaattttctgagacagacattttttagcagaaatttataggaaggtggggctggaagaaggcccttgattgagttctggaacaaattggtacaaaaaagtaagttatcaccttgaggccgggcacagaggcttatgcctgtaatcccagcattttgggaggctgaggcgggcggatcatgaggtcaggagatcaagaccatcctggctaacacggtgaaaccccctctctactaaaaatacaaaaaattagctgagcgtggtggcatgtgcctgtaggtccagctactcaggaggctgagtcaggagaatcgcttgaacctgggaggcagaggttgcaatgagctgagatcgcaccactgcattccagcctgggcgacagagtgggacaacatctgaggaatttgaaaatgaaaagataacttataaaggggattaataagcaattatactggtggatatgcaaaaataactttttaaaaatgtagagtgacttggatttaatacttaatgacagtaattagacaagttttttgggaaccaggcattgaataattaggtaaagtgcttttcaaaaaaatctggttttactttttgaactatgaggagatactagtaattggagttgttttctcagaaaaaattaataaattctttgtattttcagaattttgcaacttgtcatctatactgtataataaatggagactattgaagtctaaatgggcaattttttttttttaaatttgagacaaggtcttgctctgttgcccaggatggaatgctgtgatgtgatactggctcactgcaacctccacttccagggctgaggccgtcttccccctgagcctcctgaatagctgggactacaggcacatgccactacgcccagctaatttttatattttttgtagagacagggttttgccatgttgtccaggctggtcttgaactcaagctcaagtgatccacctgcctggtctcccaaagtggattgcaggtgtgagccactgagccaggccctaaatggaaaatttgatgtttagcctatgaacgtgcattttttagatctcctgtttcttcattcaactgacatttgaatattaattatataggtaggctctgttggaggtaggcaagttagaatcttttttgtctaatgaggatgttaaaacacataagaaaatatttgattatgagtcattatggtaagtatgtatagaaatggaagggcttatttctatatgtactgtagagtgtatttaaatttaatcacagctggaatgatgaatgtgagtatttcctttgctgtggtgtatttatttctctttctttatccctttcctttcccttctttttccttttctttttcctctttcctttcctttcttctccccttccctattactaccaattatagacttctttaatatgtttatgaagaaacattctcttatcatatatatgagctctaacattatatcactatctgcccttcgattaagccataggatgaacatttcatctctccctcttattgagttgtcaccttgtttcctattctcgtaacaccctgtcttattccttcctattcgtgagaatctctctcttcgtgtattttcattcatcgttatctcattccttgtctgtctcattctttctctttctatcatgattcacattatttgtgtctcatgttctatccttccctgtactctctctctctgatgagtactagctctctcgagctttctctgatctctctgtgtctatcgcctcatgtatnnnnnnnnnnnnnnnnnnnngtgggcacaagaatttgaaaaatgttggaagacagggataaacttctgtgacgagcctttaggttatacattaatgtgtgtgccaatttgttaaagaagtatatacagggccttcttccagccctactttataaataatttaagttagtgaagtgtgtctaaaaaaattcttccatgtatacgacggatattttagccagtaaagacttaattatgggtttgtataacatataaagagttagtagaggaaaattggagtctctatgaattctcggatgttattaaagtggatcgcaaattggaacaaatcttagagttattacaaagatagtggggaaattagatttcttgttttattcagtaaaattcagatgatttgaaatagacattatcatacccagcaaagttaatagcttatcttagcctaacaacccctcccttcccctcccctcccttcccttttttggacacagggtttcactctgtctcccaggccggagtacagtggtccaatctcggctcactacaacttccaccacccccacctcagcccccacctcccagccccccacctcagcccccacctcccagcctcccacctcagcctcccaggtagctgggacgacagattcgcaccaccattctgtgtgtgtatgtgtgtgcatgcatgcatgtgtgtgtgtgtgtttttcatagagacaaggtttcaccctgttgcccaggctcatcaccaccattcctggctaaattgtgtgtgtgtgtagttttcatagagacgaggtttcgccatgttgcccagactcaggctcatctggaacttctgagctcaagccatctgccggccttggcctcccaaagagctgggattacaggcgtgaaccatggtgccctgccttctgtgtatttcttactctgagtctttgacatttgataatgtaatcattccttagactcctttcttatttataaaaggtgatacattttcaggactgtgatttagaaatcttttttttcctctcaaaaatgcttgcaaataaaactttttttttcttggcagaggttacgcacagaaaatagacttttaaaacagcgcatcgagacattagaaaaagtaagtaagtgactacttatgcaagcttctgttgaatgcctggtgttttttctgtatatttattaaaaatcctcaaaaattctggcacatgtctcctatgttgtagtattgactgcttagcttgcttaccttactatttatttagccagataacttgttactaataaaaattgatcagttgtactggttcttaaactttagtattcaggttttaactgagattaacagtaacatattgatactatttgttttctttacacataatttctaaaaagtatgttcttttataatttagttgggagtccattctgatatagcattttaaagatgagtttcaaatgttgccctggactttctagcatattggaagtgtggcagtgattcctttaaggcctaggattgcttttagtcgaagtgactgattccttatataaaaattcactcatgttgattttcagcacaaaggaattgtgcataaacttttagttcttataattattttagtatctacttgttacattttctctgttttatatagagtgggcaaatatggaaattttgcattatttttcatagtgtgcttttgatgaaaaatcttttgtagtcatttacagatgctataagaatgaattgagtagtaaaagtatggtttaagaattttgctttattaaaagaaagacatctgaattcacaaactcttttggtgcttttttctttttcttttttatttttttgagagagagtctcgctctgttgcccaggctggagtgcagtggctcaatcttggctcactgcagcctcctcctcccaggttcgagggattctcctgcctcagcctcctgagtagctgggattataggcgtgcgccaccacgcctagctaatttttgtatttttggtagagacagggtttcaccatgttggccaagatgatcttgatctcttgacctcgtgatccgcctgcctcggcctccgaaagtgctgggattacaagcatgagccaccgtgcccagccacttttttctttctttaactagagataagagtaagtagatttaaacatacccctcatcatattgccaaggatcttaaaatcttccctgaaaatctacaatcaagaaataaataaatggaaatatggatattttgcagtatttgtcgtttgtttgaaaagtattgatgatttcatattaaatagaagtgcgtaaggacaggatatttattacatatctgcctttgttgtataataattgcagatacatcatattaagtcaaaaatagtttccctgtttttctctcatcatgttagggttgctatgagagtaattctacttttggtgactccacaggaagattgagcttgcttttaagttgttttaattatatactcttttttcccactaaatatctagcttacagtcaaatatgcatcttcttagttttttttttttttttttaaatctttggagtaagacatttaaactgggaaaggattataatatttcattgaaccttcggaatgagaatgatgctgtaagaaagtgttaagtttggattttgcttctagaaaattaagttcctttttttattggcttagatggcccagatgtgtcacttagcacttagaattctataaatactatgtatcaattgaattctgtaataaaaaagtatactttctcagttattgctaaagtttaagtttagctcattaattttatttgtcatattttccttgctttgtttctttgaaagttgtggttgcacaaattgctgtcacactttataattggaattgcttactcaaattccttctccctttcatgtaagtgggttgacaatatggattaagtctaaaagatgtaaatataccaaaagaggaagaggaaatatttgactgagtgcagtggctcacgcctatgatccccgcacttcgggaggctgagacaagaggattgcgtaaggccaggagttcaagattggcctgggtaacatagcaagactgtatctctacaaaaaattttaaaactagctacatgtggtggcacacacctgtagtcctagctgctcaggaggctgaagcagaaggaccaactccttgagccgaggagttggcagttacaatgagctacatgatcatgccattgcattctagcctgggtgacagagtgagaccctgtctctattttaaaaaaacaaaacaaacaaacaaaaaaatttgcttgttccaggtaatgaaaacccacttggaatttgtgtttggtatcttctggaaacacatgattttcaaccacctatccttgtttttatatatttttcttaaggtttaaaaataaaaacattcagtaaaaaatggttttaaactttaaatgtccattttaattagcaatgaaaagtagatggaatttgggtatatttgtttcttttttcctaattttatcacttttatttctttctcttatatttctatctgaatttttccttttgtaggaaagtgcttccttggcagatagattgatacaggtatagtttttgttttgttttagttttttaaaacatcttctctaacttctaaggaaagtcctaaacctcgaaattcatattttaatgcatgcaattttacatgcgtttttctagaaataattctttgggtggtatatgtgggtataaatttaattttttgtaacaaggtgttatcttggtttatttttgcacgttttaaagctaaccttattttttaaagtatttatttcaaaatggcaataagtggattctgtgaaattaactactattcattgaaaattttagtcctgcatgtacaactcagtaatattgcatgaattaaatttttattgactgaaagaattgttcttgtcaggtgaatttttcgtttagtttccgaaaatttgctggagcaataacaagctgctagctaatgattacgtaggctgttctattcgctgaggtgacttttttttttttttttaacatgtcaaagtaaataactaaacctcacaaaggcagtctttcttgaatctatcctaaattgctttacacacacaaaaattatgtcctaagggacaagtgacaagagcccaggaggctgaggaaaactacctcataaaacgggagttggccaccatcaaacagcagagtgatgaggccagtgctaagctggagcaagctgaaaataccatcaggaagctccagcaccaacaacaatgggtaaggagtctggtagtgcttttctcatctttctcatcccccttcctttcaatcattttttttttcatagcacagattttgtgctgttgttttaaataattttgttttagactttgaacttttaaattatacaattttatgttctgtgatatttaggggtcttattgtggcctaaggactcctgttctaattttttttctgtctacatagttttgttagaaataggtaatattttctttccttacactgtgttttaagtaatgggaaataagcagtgtatgtcagaattgcttttaagtttttagaaatctgttttcataataggtatcattttgctaacagtaatttttaaatcccaacttcagctagtttttgttcattgtacagatgaaacattatccagcatgcagaatatatgcagttatctcatttaaagcttcgacagtgtggcaatttgtgtcttacgaaatactattgcttagacttcctacatcaagacattgaattatgggttaaggtgtatgcctatatttcaaagggagagaagttgcaaagatgaaaaagattaaccctttaaaaattatcttaattaacctagggtgtatttctaattatcttaatcaacctagggtgcgtactaaacagctactaattgtacatctagcctcaggtatcttttgcagcttagacattttccattggcaaattcagacaagggcgatcttaatcaggaatatgagggtaaaagaaaagccaactgtttatctttgaaaacatattatttcttgtttcagttttccatcctcaagtaggcgctagattgtaataagtaagcagaagaagttgtgttaatcctggaactctatgcagatctggaaggcaaatagagtgactgcaaagtaggacgttctttttattcaataaaattaagaaacagcatcgtcatctcggtacaaaaaaatcagaaaaccagaagcaaaaagaaaaattggcagttgaaagggtcataaacatctttttttttctgttattgaagattgctaagaaaaatgaataggagagtgacaaaataatactaaaaagaagggaactcatattttgctccacttttgtatgtaatgtcaataatatcaaagcattaaaaagaaaaaaacaattgtggatttatattaggaatttacctgaaataagttacttcaatgtgattttctaaagaaaacacaataagtattgtttgcatttagcataagctacagtcataatacattagaatcatgaattaaattttttacattgtttttcaaatattgagacttattgatagatgtatatcaaagggatagaatgctggtttatagtgaaaaatttaacttggtgagcaaaaatggccataataaagtgaatgagcatattacggctagaaagtgaacatctgttgctcattgttttaattatagccttccaatataactttatgaattcttcaaagtttcagaataagggttttaaatttgtattccagcaggaggtattgaattaccaatataagcatccaccgccaccactccctactgccaaatagtggcaatttatatgatataaagagctttggattttatttatggaactagattctagtcctgttttgccaactatgtgatcttgtatactcaaagacagttttgtgtgtgtgtgtgtgttttttcccaaatgattaaatagggctagaccttctcaggtctctctctttcacttttaaaattaactttattaaagtataatttatatgtaataaaattcatcaaatgtaggtatgtagcttgatgtgttggaaatgtatgtagttatgaaacactaccacaatcaaaacaaataatatttctatcattccctttatggttcaccaccccccaaccccagcaacctgtgtgctttctttcactatagttttacctcttctagaatttcaaataaatagaattgtaaggtatgtgacttttatgtctggcttctttcacttagcatatctattcacttttttgattatttttgaaagttttatttttaattgacacatcaaatcagagtaattagctaacacattgattgcctcgaacattcctttgtggtgagaacattcaaaatcccctcttctagctattttcaaatatacaatacgttattgttaactatagtcactctactgtgcaatgtaacaccagaatttattcttcctatctaactgtaactcatacctgttgaccattctcttcccatcaccatgttcccaattccctccctagtctctagtaaccactattgtattctcagtttctatgagatcaacttttttagattccacatatgagtgagatcatgtggtatttgtctttctgtgtctggcttatttcacttaacataatgtcctccaggttcatccatgttgtcacaaatgacaatttcattttttaaaatggctgaatagtgttatttttatacatttaggggatccaagtgcattttgttacatggatatatttcatagtagtggagtctgggcttttagtgtaaccatcagctgaatagtatatattgtatccatgagttaatttctcattcctcaccgcctctcaccatgttacctttctgagtctccagtgtctattattctatgctctatgtccatgtgtatacattatttctcatttataagtgacggtatgcaatatttgactttctgagttattttacttaagataatttcctctagttttatccatgttgctccaaaacacataatttcattctttttaatggctgagtaatatttcatggtgtatatacacaccatttttttgtattcagtcatccatcaatggatacttaggttgattccatatctttgctgttgtgaataaatctacaagaaatatatgagtacaggtatctttgatataatgatttttcctttgggtagatacccagtagtaggattgctggactgaatggcagttctgtttttagttctttgagaaatctccataccatttgtcatacaggttgtactaatttccattcccaccagtagtgtatatgtgtcctcctttttccacatcctcaccaatatctgttattttctgactttttaatagccattctgactggtgtaagatggtatctcattgtggttttaatttctctgatgatagtgatgttgagcatttttttcatatgtttgttagccatttgtatgtcttcttttgaaaaagtctgttcatgtcctttgctcactttttaatggagttttatttttcttgttgagttgtttgcgttccttgtagattctggatatttgtcttttgtcttatgtgtagtttgcaaatattttctcccattctgtaggttgtctattcactctgttgattattccttttgctgtgcagaagctttatagtttaattaagtcctatttgtctatttttgtttttgttgcatttgcttttgaggtcttagtcatgaattctttgcctaggccaatgagcagataggttcttcccaggttttcttctaggctttttaaattttcaggtcttaagtttaagtctttaatccatatttttttccttctctttaatccatcttgagttaattttgtaaatgatgagagatatgaatccaatttcattcttcttcatatggctaattttcccagcaccatttattgaatagggtgtccttttctcagtgtatgtttctatcaactttgttgaagatcaggaaactgtaggtatgtgactttatttctggttttctgttctgtttctttgatctgtgtgtctgtttttaataccagtaccatgctgtcttggttactatagccttgtagtataatttgaagttaagtaatgcaatatctccagtattgttctttctacctaggattgctttggctgttctgggtctttcttggtttcatatgaattttaggatttttttttcctaactgtgaaaaaagacattggtatttttataggaaatacattgactctgtagactgctttgggcagtatggtcattttaatgatactgattcttccaatccatgagcatggaatgttttttccatttgttggtgtcatccgcaatttatttcatcagtattttgaagttttccttgtaaagatcttccacctccttggttaacagtattcccaggtatttaaatttttttgtagctgttgtcaatggaatttacttctagatttggatctcagcttgattgttattggtgtacagaaatgttactgattctgtacattggttttatgaaactttaatgaattcttttatcaaatctaagagccttttggaggaatctctagggttttctaggtataagatcataacatcagcaaacagataatttgacttcctcttttccaatttgaatatcttttatttctttctctttcctggttgctctggctaagactgttagtactatgttgaataagagtggtgaaagtaagcatccttgtcttgttccagatcttagaggagtgctttcaacttttccccattcattatgatgttggctgtgggtttgttgtatatggtttttattattttcaggtatattccttcaatgcctatgatatggcttggatctcccttccagatttcatgttgagatgtaatcctcattgttggaggtggtacctggtgggatgtgtttggatcatggggcaaagacctcatgacttggtgctgtcctcatgtgagtgagtccttgtgaaatcagattgtttaagactgtgtggcaaccccctcccctactctcttgctcccactctcactgtgtgacatacctgctcctgcttcgccttcctcaatgagtaaaagccttcccagaagtaaatgccagtgcttcctgtacagcttgcagaaccataagcctattaaacctcttttctttataaattacccagcctcaggtatttcttcataacaatgcaaggagaacctaggttttttagtttttttttgtttgtttgttttaacaggatcttgctctgtcacctaggctggagtacagtggcacagtcatggctcactgcagcctcaacctcccaggttcaagtgatcctcctgctttagcctcctgagtagctgggactacaagcacacaccaccatacctcattaatttttgaattttttgtagagatgggttttcgccatgttacccaggctggccttgaactccagggctcaagcgatccacctgccttggcctctcaaagtgctgggattacaggcatgagccgatgtacctggcgtatgtttggtttttgtttcgttgggttttttctgtttttaatcatgaagggatgccgaattttatcaagtgcttttttttgcatctgttgagatgatcatacagtttttgtttttagttctgtttatgtggtgaatcacagttattgatttatttatgttgaaccatccttgcatccctgcagtatgacccacttgattgtgatatattatctttatgatgtgctgctggatttggtttgctaggatcttgttgaggatttttgcatctgtgttcatcagagatattggtctgtagttttgttatttttgtgggtccttccctggtatcacggtgatgccggcttcatagaatgagttaaggaggagtccctccttgatgttttttggaagagtttcaggagaattggtactagttcttcattgtatgtatggtagaatttggctgtgaattcatctgatcctgggcttcttgttcttgttgggagatttgttattactgatttaattgcactactcattattagtctttttaggatttctgtctcttcctagttcagccttagaaagttttattcttccagggatttatccctttcttctaggttttctagtgtgagtgtagagatgttcatagtagtctctgttcatttgtatttctgtggtatcagttgtaatgtctcctttttcatttctgatcacttgttaatttgggtcttctctcttttcttggttaattgagcagtatattggttttgtttatttttttcaaagaacccacttttcatttctttgatccttagtatattttgttgttgttgttctcagtttcatttagttctgctatggtctttgttatttctgttcttctgcttgctttaggttcttgtttttctagttcttgaggtacgatgccaggttgttaatttgtgatccttctggtttttttatttaggcatataatgctgcagacttcccacttggtgctgcttttgctatatcccagaggtttttgtatgttgtgtctccatgttcatttgtttcaaaaaagttttagatttctattttaattttgttgctgacccaaagatgatttgggagcaggtgaatttttatgtatttgtatagttttgagagttcttcttggaatcagtttctagttacattccactgtggtccaagaagagacttgatatgattttgatttttgaaaatttattgagacttgtttcatgggctaaaatatggtctgccttagagaacatttcatgtgctgatgagaagaatgtatattctgtggttgttgaatagaatgtcctataaatgtctattagagtccaatttatgtccagtatttctttgttgatttcctgtctcagtgatctttaatgctgtcattggggtgtggaagtccttctctattattgttgtgctgtctcttttcttagatagagtagtttttctggggttctcctttctttttcgtctgagtcatgtactgtttccaaggcactgtctcaggatgtcctgagaacatgtgccccagtagtagttgtcttatgaatctgggtacctcctatatcgggtacatatatatttaggattgttacatcttcccgttgactttatcccgttatcattttaaaaatgaccttcccttgtcttttttcactgttgttgaatttaaagtctgttttatctgatacaaagatagctactcctgcttgcttttggtttctgttggtgtgggatatcattttctaccctttttccttcagtctgtattaggtgggtttcttgtaagcagcatattactggatcatcctttttgtaagacctgtaagttttatacttttgtctgtttttatgatgttgagtattgaccttttgtttacatgtttagaactcacttgaacatttcttgtaaggctggtctaatggtgatgaattctgttagcatttgcttgtctgggaaagactttttctccatttatgaagcttgttctagcaggataaaaaattcatggttgacaggttttttttttctttaataagtcttaaaatgggattgtgattttttttctggcttgtaaagtttctgccagtatgtccactgttagtctgaggggatttcctttactgatgattagacacctttctcttgctgattttaggatttttttttttccttcatgttgtcattagtctgatgagtatatgtgttggtgaagtccttcttgcactgtattttcctagagttctctgagcatcttctatttggatgtctaaatctctagcaagagtagggagttttcctcaattacttcctcagataggttttccaaactttttgctttttcatctccctcaggaatacctatgacttgtaggtttagacattttatataacccctatacttctcaaaggctttgttcatttttgaaaattattttttctttattttcgtctgactggactaattcaatagacctgtctttaagctctgagattgttttttctgctgggtttagtctactgttaaagcttttacctgtattttataatttcttcaatgaatttttcatttccagacttgattttcagatttcttggtgttgattttcattcagctttctcttagatctcattgagcttcttggaaatcagtatttttaattctttatatggtatttcagagatttcattttagttaggatctattgctagagatttagtgtgatcttttgagaatgtcataacactgtctttatacttccagaattgtttggctgtttccttctcatatggagaaacttatcttttcttcttatttttgaatttactttcatttggacaggaatttttttcctctgaaggatataactacaatgtatgttctgggtgcttccttggcagaatgtatgagttctttgaatatagatagcctttgtgtggtggttttctcaaatgctagttgtagtagtagtgtactggctgtgtgagtagtatcacagcttcctgcagggctgggatggcggaagtctcaagaatcttatctcatttcccagcactgtgcacttgtgtcagcagattttctgttgggttgtgcatttcagcctccaggacagtaggtggtggttgtgggtaagagcctgctgcaacagaagcagatggacaggtgcttgatctttgtttaatgggggaagttctttgttgcttcaggcaatgggctgggctgtggaatgtacagtggcttgagctctctgctcaccccctagcaggggacaagtcagggcagagatggacagccaagccggcccttggattccccaatgatgagcacaagcagaagacctgagtgggggtggcagggaagctcctggtaagtacactgaggtctctgcagagaggcagggagccaccccagttccatagcccgggcaggcaggaatgtaatctctctccctgtcatgcccctgtccccaaactcagaacactcaaattggtcagacaccactgtctatctccaggctgcaatgtacctgagagccataaaagatgactgccccttggcttgctgccagaatgtctttgttttggagtcttcttcctcagtccaaaacacacagctttttggctctcctctcccttgcaggaacgctgctgctctgcatggagagggggagggggtcccaccttttgcacaagcttagatatggtggactgattgccagtaagaccacagtcacccctgtctgccccagaaagtctgtgtgctctgatgcacccatgccagtttcctgtggtatcagccatggctatgcctacagcagtggggttgaggaggagtccccatctccatgcctgggtctgagcactcatactaggttggcccctgggatgaaatcacacttgcaaagccttgtagagccaagcacagtgcccacatctttgctggaggcagtgcagtcactcagagtccacaggtggtgagctcttgggcacaggaaagtatgtgttctggtttcctttgtcccagtgggtgctcccttggcgtgcaatacttgttcttctcttcggggcagcagttgccgaggaaccctgcagctccctgggtccagccatccctttgctgctgccacaatctgagcagatgccagggaatgtctatggggctctggtgatgtggagacacaaaggctgaggttccctgggcagggtacagacccctgatggctgtgctcccagtatagcaccctatcgctgctgctcaagtccgggggcagagtgagcaacccagtgcaagttggtaatctggtgcagtgccctcaagaagtccccaaatcactgcccacaccagtgtttgggtttgcagggtagaggagatctccgacagttcagttaccagtggtttgtcacaggttaaagaggagcccaaacactcccaactacccttttgactagataccaaatccctcggggttcctagccgatctctgccagcttcttgcttccttctttttctgtgccccagcttcttcacatgagttctctactagcctccagcattctctggatagtctattcacattatggttattcacttgtaaccttggttcttctttctgaagagaactggcattggacacctctagtcattcatctcgaaccctctccccaagaatagtatttgattgtgcatacacaccacatttcccttatccgtttgtctgttgatggatatttaggttgattccatatcttagcttttgtgagtagtgttgcaataaatgtgggagtacagatacctcttcaacatactgattttatttcttttggagccagcagtgggattgttggatctgatttttttcattgtgataaaatatatacaacctaaaatttaccatttaagtgtacagttcagtgtcattaagtacatttataatattgtgcagccatctccactgttcatttatagaaccttttcattgtctgaaacagaagctctgtatctagtaacaataatcttttcccatcttcccagcctccggtaacctctgttctactttctgtctctatgaatttgcttattctgggtagcttatttaagtggaagcacataatatttgtccttttgtgtgtggcttattgcactaagcatgatgttttcaaagtccatcattgttataacaggtatcagaatctcattcatttttatggctgataaaattccatagtatgtatatactacgttttgttcatccgtttgtttgttgatggacatttgggttatttctgccttttagctattgtggataatgttgctatgaacattgccctataagtatctgtttaagttcctgctcttaattcttttaagcatatacctagaagtagagttgctggatcatatgtaattttatgtttaattttttgaggttgtgtcagacttatctatagcaactgtaccactttccattcccacaagcagtgtacaagggttccaatttctttcttttttttttttttttgagacggagtctcgctctgtcgcccaggctggagtgcagtggcgggatctcggctcactgcaagctccgcctcccgggttcacgccattctcctgcctcagcctcccaagtagctgggactacaggcgcccgccactacgcccggctaattttttgtatttttagtagagacggggtttcaccgttttagccgggatggtctcgatctcctgacctcgtgatccgcccacctcggcctcccaaagtgctgggattacaggcgtgagccactgcgcccagcccccaatttcttaatatccttgccaactgttgttattttctgatttttgtttgttaagtaatagctatcctagtaggtgtggggtagtatctcattgtggttcaaatctttttttaactttaaaattctttcaatgcaaagactatatcaaatagacatttaaataattttttgaccgagattttgtttatggttcctctctttctccttttctccaaatataagtagcggccaatttagtcatgggaaagataacaactaatttctttattctgtaatttattgtaaatatatcaggttcaatttgtgtaaatactttgtattttccttagtcctatatgtgttaatcttataatggaatgaacttattcatatatttatttgaaaactaatgtgcaaagtattgtcttaagtgcagagggtacgataatagtaaacaagaaaaacgaagactgctgttacgtgaagtgttctagttggggagacacattaaacagatacaatttcaggtggtaataaggtgatgaagaaaaataaaaataaagcagaggagaggtggtttgtgcaggtgctactgtaggtaagctagttttggagagcttccctgaggagctaagatttgaccagagactcaatgatatgaagatggaaactatttgaagatctgggaagaaacattccagatagagcatacacttagtagaaaggcctttatcaaggaataaatttgtggttttcaaggaacagtaaaatgtatatttataaaccatagggaaaccacctaaaatttttttagagaaaaatatataattaggtagcaaataacagagataaaattgagtaatttaagaaattatttaatcaggaaaaagaaaaaaggaacagcaagtaagtggatcagatagaaaatttggaagattatagattttattccaaccatatcaataattatattaaatgtattttaaatataccaattataagattggataaaaagttaaaacatatctgtaagaaatttgctttaaatacaaagatcttgttaggttaaaagtaaaagaatgcgccagcaatgaataactagagaaggaaattaagaaaaaaagtccattcacagtagcttccaaaagaataaaatgcataagaataaatttaaccaagaaggtaaagacttgtactctgaaaacttgtactctgaaaaaaaggatgtttactcatttgtcaaaataaagaagatataaataagtgaaaatctatctcgtatttgtatattggaagtcttaatgttaagatgtcagtactacccaaaatcacctacagattcaatcctatcaaacctatcaaaattcccatggacttttgcagaaatgcaaaagctgatcttaaaattcacatggaattgcaagtggccttgaatagccaaacaatcttgaaaaaaaagaacaaagttggaggactcacactttctgatttgtaaacttaatacaaagctagagtagtcaaagtagtactggcataaggatagacacatagattaatggaatagaaatgagagtccagaaataaacccatacatctatggccagttggttttccacaaggatgctaagaacattcaatgaggaacgaatagtctcttcaacaaatgatgctgggaaaactggatattctcctgctaaagaatgaaattagatgcctaacatactgtatacaaaaattaactaaaaatattccatagattttacagttttgttttgttttaggcagggtctttctctgtcgccaggctcgagtgtaagggcacaatcagctcactgcagccttaacctccagggctcaaatgatcctctcacctcagcctcccgagtagctgagactacaggcacatgccaccatgcccagctaatttccatattttttaatagagatgaggttttgccatgttgcccaggctggcctcaagctgaactcaagcgatctgcctgcctcagcctcccaaagtgctgagattacaagcataagccactgtgcccagccaactttatgatttaaaaataacatgtttatgtttttaaagccataaaaccctgagaagaatacatagagataaatcttcatgaccttggatttgtcagtggttttagatattggttcttaggcaccaaaggcatgagcaacaaaagataaactggacttcatctaaatgaaaactttttgtgcatcaaaggagattaagaaagtgaaaaggcaacctgtagaatggtagaaaatagttgcaagttttgtagctgatcaggatctaccatccagaatatatcatgaactcttacaactcaacaacaaaaagacaacccagttataaagtgggcaaaagacttgagtggacttttctccaaagaagatatgcagatggccaaaaagcaaatgaaaagatgctcaacatcatttttcatgagggaaatgcagagcaaaaccatgatgaggtgcctcttcacatccattataatggatggctataattttttaagagacatgttggcaatgaggtggaaaagttgaaaccctcatacatttctttttggtaggaatataaaataaaatataaagctgctgtggaaaacagtttggcagttcctcaaaaagttaagcatagaattatcatggtaccctgctattcaactcagaggtatgtaccgcaaataagagaatgcttgtactcaaacaagtatgtgtatacacgtttgtagcagcagcattcacagaaaagtggacacaacccaaaaatccttcagtgggtgaatggattaacaaattgtcgtatacacacaatggaatattattcagccataaaaaggaatgaagtactaatatatggtataaagtagataaacttccaaaaccttaagctaagtgaaaaaagccagacccaaaagatcacatattgtatgactccatttataggaaatatctagaatagataaatctaaagagaacagaacacagattagtggtttccagaaggtggtgatgggggaaagataagaaactgcttaataggtaaggggttttactttagaatgatggaaatgatatggaactagatgtggatggtcatacaacattcttaatatactataagacactgaattgttcactttattttttttatttttttatttttattattattatttttttgagactgagtctcgctctgttgcccaggatggagtgcggtggtgtgatctctgctcattgcaagctccgcctcccgggttcacgccattctcctccctcagcctcccgagtatctgggactaaggcacctgccaccatgcccggctggtttttgtttttttttttgtatttttttttttttgtatttttaggaaaagcaagggnnnnnnnnnnnnnnnnnnnnnnnnnnnnnnnnnnnnnnnnnnnnnnnnnnnnnnnnnnnnnnnnnnnnnnnnnnnnnnnnnnnnnnnnnnnnnnnnnnnnnnnnnnnnnnnnnnnnnnnnnnnnnnnnnnnnnnnnnnnnnnnnnnnnnnnnnnnnnnnnnnnnnnnnnnnnnnnatgggcggatcacttgaggccaggagtttgagaccagcttggccaacatggtgaaaccccatctctactaaagatacaaaatttagctgggcatggtggtgcatggtggtctagtaatcccagctatttaggaggctgaggcatgagaatcacttgaacccaggaggtggagtttgcagtgagctaagattgcgccactgcactccagcctgggcgacagggagaaattctataccccccaccccctcaaaaaatgttattgacctcctacctctcctccaagcacccttcctgcccccttcaccttccctcttgctaggtgaccaggaaggaagaagcaatttagtcaggatggctaaaggtgatcccaagaaaccagagggaaaggtgtctgcttattccttctttgtgcagacatgcagagaagaacataagagaaacccagaggtctctgtcaattttgcagaattttccaagaagtgctctgagaggtggaagacagtgtctggcaaagagaatcctaaatgtggtgaaatgacaaaggcagataaagtatgctatgcttggaaggtgcaggattgtgaaccagttaagtgaggcaagaagaaggaccttcatgtctccaaaagagacatgtctgtattcttcctgcactgttcagaatttcaccccaagatcaaatccacaaaccctggcatctttattagagatgtagcaaaaaagctgtgtgaggtgtgggataacttaaatgtcagtgaaaagcagccttgcatcactaaggcagtgaagctgagggagaaatacgagaaggatgttgctgactttaagtctaacggcaagtctggtgcaaagggtcctgcttaaagttccttggaaaaaggtggaagaagtagtcaaagaagatgtgaggaagaggaggaggaggaggaagaggaagaagaaggtgatgatgaataaaaaactgtttatctgtctccttgtgaataccttagagtaggggagggccatgattgacacatctgttgtttgagaaatgtctgttgccctcattaggtttaattacagaatttgatcacaatcatattgcagtctctcagagtgctctaaaaattgtcagtggtttacctgaagtggtcatgtgtgtctggaacactctgaaattgtatcaaagttgtacatatttccaaacatccccaaaacgaaaagataatctcatgttttcctcactctatgcactttgctgttggtgtgacaaagcatttaaagatatttctgacattttaaaaaacatttgtaaggtggtattaactatacggttattggctagaaatcctgttatcaactgtacatatatatagtttataaaaagaacaaaacaaccaagacaaactcttggtgctcgtttcttggcgctgagcctgtgggggacaatgccttttggaggggtcgtagcttagagcgtgcactgtgaggctagtcctgtttcccctgtaatgttcagccatttagcttcagcttgtcttgtttctacaaacggtaatataacagtctgctaccattcttagctgtggacaaagaggggtcagctggcctgagaagtgttgggatttttttaattaagtgcattgtctataaactttttgaacaagctgtagaactgttgtcagcaaagtaaagagccactgcatcaatgaaagttcaagaaagaaccttctgtacttaaatgtgattttcagtgttctggggttttttttgtatgtttagaatgctgaaatgtttttgaagttaaatagtgttaaaaatgattttagaattttgcttcaataaattgtttttaaaaagactaaataaatgataatataaagctcaaagaaactcgacacatttaagtgattgcagtagaagacgagtttatgggagaacgtgtaaagtccctgtgctagaacccattggtgagggtcaggttagaaccaacaacaagtgatctggtttgcagggggagcctgggaggattaggagattcactcagggctggggttgggcatgtcttgatcagagttgtggttgccttgagacttataaaggagaatgcaacgtgaagtgaagcagagcaggttggtggcagcaagagaagtgagttgcaacagattatcagaccaatgacctgtagcccaaaggcaaggggatttagatataagagacattaatttggagtatcagcatttactagattaatgggagagcagcttggacaaggatgaatatgggggctattacccacagctaagatttgatatgatttggggatgtgatatttggataggatagctcaatttaatgtgccagagtagagcagacataaggttctttatgttcctctagttagaaataaggttggtcccaaaatatcagtgaatctgagcctgtaggtaggggtgaaatagtatcagttgcaaagattagaaattacagaggccaaagtaggttgctgtgtagctatggaaatgtgtagagcttgatagctaatgacagtgactttcccccacagtggacttctaggagtgaaggatcaagatggtctgcctataattattggacataatattttaattacaactggaaaaaaattaaaaggatgaaaaagatataatatggaaatctaatcaaaacaaagcctggagtgtctgcattagtatcatagacaaggtggactttagaacaaggaatagcaccaagagtaaagagaactatctataatgatagttcaccaagaagacataacaatcttatttaagattgtatgtgtttaggaatgtatgtcacctaatatatgtatgctaacaggaacagtaacttgaactgatagaactgaaaggtagagtgaacaagttcaggtcttcgacatccctgtctcagtaattgatgaagcaagtaggtagcagaagacctgaacagtactatcatccaacctgccctgatagatatttatggaacactgtacctaataacagcagaatacatatcctttcaaacatacatggaagatttatgaagatagaacatattctgggccttaaaaggaactttatcaaatttgaagtaattgaaatcatacaaaggatcttctctgactctaatatcattcaattagaaattaataataggtatctggaaaatcccctaatatttggaaattaatacgtttttacccatgggtcaaagaggaagtctaaaaggaaattagaacatattttaattaaatgaaaatgaagacacaatatctaaaaatttgtgggacacatctaatgcagtgcttagtggaaaatgtattaagtgcttataatattaagtggaaaatgtattaagtgcttattaggcaagtcagtaagtctcaaaccaataatctaagctcccaccttaataaactagacatataaagaaattcaagctaaccaagcagaatggacaaataataaaaagtgtagaaatcagttaaattgaaaacaaaagtagagaaactttgtcaaaccaaaagctggcttcttgaaatgatcagtaaagttgacagatctgtgtccagactgatggaagaaacaaccaatgtcaggaatgacattaactttttacaggtgtggcccagttgtcttatttcatattctagatttgtctaattccttcctcgtggtgtcattgtatttcttgtcaactggactcagacatctagattatagatgatgttgtaaacttctttttgctttaaatcaggaaggcacatgatataaattgtgcccattattagtgatgctgagtttgatttccatgctaggtttggttatcccagactctctcccttgtaaaagctatgatttcatgtttgccactattaagtgatctgttggaaatatttttgtaccaaataactatcttgttctccatccaccttttacctaatggttttaccctccacaaatgatccttatggaatcagttattacattaggtttccagaatggtgactttcatattctctcatttttctacatttattagttataaacaagaatctttctctttttttcttttaatatctctagctccctctgactcactatgaactctttcatgttactccagatttattgacttttgttcaatatgtcatataattcttaatagtttcaatgctattggtacagtgatatgctatatagttatgttacaatagaatattaaacttcagaacagcagttttttaaaaggtaaagtttatttttaactaattttgagtattggcattatttaacaagtgtttctgcagttccagttatagaatgattgtctttagtagatcactgcttccattttacgctggcacttggtagtttgaacctaatattgttagttttcaaaaatgattgaaggccaggcacagtgactcatgcctgtaaccatagctctttgggagacaagacaagaggattgcttgaggccgggagttcaagaccagcgacacagcaggaccctgtctctacaagaaataaaaaaaattagccaagcatggtggcacatgcctaaaagtcctagctactggggaggctgaggtgggaggatcacttgagtgatcattgatgatgccactgcactccagattgggtgacagagcaagaccctatctctttaaaaaaaaaaaaaaaaaaaagatttgagttaatttattattgaatttgtatttagtgcactaaataaattaagtaaataagtataagatcaaactgagatatagattaaactttccatttaagtattttacatgctccatatgagtttttccaagaagcccctagatgtagaaatcctccagtgatatttcacacagttgcacatctgactcctgctaatgtggggtataacaaatgtgtttatgttggacaacttttcctgatgagaccaactgtctaagtctagcttgatccatttaaaagctttgtgacctacctatgactacttatcattcaggtgtttttattatgcagttttatccagctgttcttggtcttaccattcaggtatttttattatgcagtttagttcatcataaataaggaggaatttgagttaaaagctgctgaatgctgaaatgactgccgtttgaagttattgggaccttcatactaggaagtacttaatgggaggctagacaggatttcttctgaccttccctcccttttctataattctagagagaacatcaaagaattatgtaggacttttaagaaccaaggatttgatatgaagaatataaacccatcttacctggattaaacacatgaataaatgttaataaaattaaaactacctgtttatcagtgaagttgtgaattcttctagataatgtattttagaaaatgtttgttcagcagcatttaggaattattcacacctgatatacctggtgggtttgtttttctttaggaaaatggaagttagttgatataggtctctctaaaaatccaagatagatagatgactttacacttataatttggtaaattctttaacttttggtcactatacctataaatctggacggagattttttccagaactaattttgaccttagtctaaagataaaatgttttacattcgtatgtgattatattttccttttaaataataaatgaggcgttactttaatggaaattgttttcttaacattttcttagcattaacaacaataacaacaaaatcttacagttacacaaataaccagaggtaaatgtcttcttaaaggatgtaatttttggatgttgagcgcaaatcatataaaaattatagatttttcaacaattttttttttttgggatggagtatcgctctgttgcccaggctggagtgcagtggcacagtcttggctcacggcaacctccacctcttgggttcaagtgactctcctgcctcagcctcctgagtagctgggactacaggtacatgcctggctaattttttgtatttttagtagagacggggtttcactgtgttagccaggatggtcttgatctcctgacgtcgtgatccacccgcctcagcctcctaaagtgctgggattacaggcgtgagccaccgtgcaccaccgctcccggcctatttttcaacaattttagtgtagcaaatacttaaatagtacaacagtattgcttgggtttttttaaatcctgtttacagcatgtggtagggaggattacaaacatccttttggggtcatatgctgagggagaggaagatacaactttttatctttttctgctgtgattttgtggtgtagaaacctattccagagtacttgccttgtataacttttttcagatgcttttggatatggcggtccaaatgtgccatcttcccacattattacaaattttgtttctggaacaaatggaaacattgtatcattattttgttttgggaaagtggttcaagattgctacataggcatttcaattaaaaatagattaaccatcagttttatagatttttttttgcagcattcaacttccacttcctatgtttaatgtaaattatataatacagggattttgttgttaaaccaggagttaactgattgattcagcagttaatattttgctaacctacctatgaaaagcactgtttggttctgttaaccaggcagttattgatttataatggtaagtcagtcaaactgtctccagcatttgcttgtatagtatatatagagataaacattttaaaaattaatcacacaattttttttttcaattttacttttaagttctgggatacatgtgcagaatgtgcaggtttgttacataggtatatgtgtgccatggtggcttgctgcacatattgactcatcctctaagttccctcttctccctcaacccccaacaggccctggtgtgtgttgttctctcccctgtgtccatgtgttctcattgctcagctcccacttaagagtgagaacatacggtgtttggtattctgttcctgtgtcagtttgctgaggatgatggcttctatgtccctgcaaaagacatgatctcattcctttttatggctgcatagtattccatggtgtttatgtaccacattttcttaatctagtctatcattgatgggcatttgggttggttccaactcttcgctattgtaaacagtgctgcggtaaacatatgtatgtatgtgtctttatagtagaatgatttgtattcttttgggtatatgcctggtaatggtattgctgggtcaaatggtatttctggttctagaaccgtgttggttgaactaatttacattaccatgaacactataaaagcattcctatctgtccgcagcctcaccagcatctgttgtttcttggctttttaataattgccattctgattggcatgagatggtatctcattgtgggtttgatttgcatttctctaatgatcagtgatgttgagcttttttttgatgttttttggccgtgtaaatgtcatcttttgagaagtgtctattcatatcctttgcccactttttgatggggttgtttttctcttgtaaatttgtttaggttccccatagattctgaattttagacctttgtcagatgggtagattgcaaaaattttctcctgttctgtaggttgactgttcactctgatgatagtttcttttgctgtgcagaagctctttaattagatcccatttgtcagttttggcttttgttacaattgcttttggtgttttagacatgaagtctttgcccatgcctatgtcctgaatggtattgcctaggttttcttctagggtttttatggtttggggttttacatttaagtcttcaatccatcttgagtaaatttttgtataacatgtgaggaagggatccggtttcagtttgctgcatatggctagccagttttccaagcaccatttattgaataggagatcctttccccattgcttttgtcgggtttgttgaagatcagatggttgtagaagtacggtgttatttctcaggtctctgttttgttccattggtttatatgtctttttggtaccagtaccatgctgttgggttactgtagccttgtagtatagtttgaagtcaggtagcgtgatgcctccagctttgttctttttgcttaggattgtcttggctatacaggctcttctttggttccatatgaaatttaaagtagtttttttctaattctgtgaagaatgtcaatggtagtttgatgggaatagcattgaatctataattactttgggcagcatgcacaattttttatttagagttgtgataagtgttacaaaagagatgagaacagggttccatgaaatgtttgggttcctgaaaagagcatataaatgtcatatcttgaacttagttaaaagcttaatgtatacttaaattcaagcaatattggatacatttgcatggacaaccctttttctaatttcaattttttttcacttaataatatgagaaacttcccccaatacaaatatttactttttactgtattactcctatttccttcaaatattgaaattttttttaataatatgagaaacttcccccaatacaaatatttactttttactgtattactcctatttccttcaaatattgaagatttttttttaagctcaagacacaagcaaaaaggattactgaggactttctaacttacctttacctttgtaatttttgcaacaccagaaaagcacataggattgaaaagcagactctgcttactaaaaagaatttctgtcagtttcattggaatgggattgctggtatcacagaaacattatgagattcatttacataaattaacttgatgtaagtatagagaagtcatctgtcatttctatgcttttaaataaacggctccccttgctgagactgccagccatcataattgtggcagttgtcatttggtaaaacaaattgtgtgtctgtccaagttactcacttgaatatgaaatgcactcttctaggaatttcttaatacaagaacattatgtgagatctatatgcttagattttttttagaggtttggatttttttaatattatataattaatttttagaacagtatatattaaaacaatatattaaactcttcaacacctatatggcttaaaggtgaggaacatgggctctgtaatacaaactgtcaattaatagcactatcaactgctgtttgaccttggtgtaccctattagtttccttattagtaagacagtaattgtggtgaaggttaaaggagaatataaagtgcttaacatgtgtctggcacatagtaagtggtgagtagatgttagctgctgtcataattgtcatttctgtcaaacattaaaacatgtttataaaactgttttccccctgtggaaaatagaataaattgaatctacagtggttagcttcaggtaatttatagttcacagcagcatcttttccttagacactgtgtaatttgcagtatgttaattggccaccatcatgatgacctgggaattatattctgtaaactctgtcagtggcaaaaaaatttacataatacgtttagagttattttaatccagaagactaaaataatatgttttagagtataaaaagcataagatatatattatccagaatgacttgttatcagagcatttcagctctctgtaaattttattaataaagatttgtgcccaacattactatagctttttgtacttgattggattagttggtttatgccaatcaagaattccattctcatatgggcctttgagtttgatgttttcttggggatcttctaatataaagtctttgcaaacaaacctgtgctacagttgccagggctttaagttgagggcaaaaaaattcttccagtacccacgaaataactgtgatctaattaaataaattatggcacatctagtttggatgtggtcattccaaaagaatgcctttttcctaattgataaaaggtaagtatttgctaagatgatgtgtctgttgcagatgcacttctcgtattgaaatattgtttcaatagtatcaaaattactagaagaaataatgtataatgcattgaattaaagtcctcatttgcacatctttttttggtaactggggcaggagagtaccatgtattaagcatctggttatttttaatagttttgatttgacatctgttttgttcctaacatattaaagagtaaaaataactgtgctttattcatgctagttcagtagaagattgttttttatgactttattttgaaattttgagttgccacattttctttactacataaattaaatgtgaagtgatagacaatttattttagaaagtattttataatgatgaattacatattgcttttgtacagaagcttttctatgggcactggcttaaaaatgacgacttaagtgtttgcatcaatattcatgttttatagagtaggaaagcaaatgggaaagttgcgtgcttccgtggttaatttctttgtgcagcatctgcgtcttctctacttccagcaattatttctatgtatatcttttttttttttttttcttgagacaagagtcttgctctgtcacctgggctggagtacagtggcatgatcttggcttactgcaacctccacctcccgggctcaagccattctcctgcctcacactccctagtagcggggattacaggcgtgtgccaccatgcccagctaatttttgtatttttagtagagacagggtttcaccacgttggccaggctgatcttgaactcctggcctcaagtgatccacccgcctcggcctcccaaagtgctgggaaaccatgcatatcttttgaagaagatttctacatttctaaggacaaatacaattttgttattttggaatttagatggttcacattattgtaggtaccctgttttttttctattagattaaaatatatttttcagtaatctttacatgtcttctgtagtatataacagtactatcaaatagcaatataatgtgtcacatatgcaatttaagattttctaatacccacattaaaaggagcaaaaaaaggtaaaattaatatttttatttacctcagtatattcaaaatattattttaatgtaatcaatataaaaatcattgagatttttttatttcatattaattcttcaaaatccagtttgtattttatacttataacttgttttaatctgtattagccacatttcaagtgttcagtagccacatgtggctaattgctatcctatttattgtgcagtgtaggtctgtaaagtcagaaaaaattctttgtatctggatggatggacagataaaaggagatgtttatcttatatgaatcagatttgatcagcgtaataactagttaccaaaacccaataatgtggtcatctttatagatatcaaaggtgggcttttttactcattggagaagttaattggaggagatacattggaaatattgggtagatggaacttctcctatttagttgcccttaatgtaatataactgtattatgtggttgcattgtttttattgtatatacatgtttatactttcatgaaatttcagtgtatgtctgtaacctttagcataaatgcagttccaactacaacgaagattttgtgctacagctagagaaggaattggtccaagcccgactgagtgaagctgagtctcagtgtgcattaaaagagatgcaggataaagtcttggatatagagaaggtaagaaacctacacaaatgcagtcattcccaaattagaggggatatgtgatatttattaagtacttactgagcaatttaattgacttggtgtttttatacattagaagccttacatattagttactaagaggaaaaggaaaaaaagatttttaaaattgccagttattccttgttgccttcatactaatcacagccccgtatttaaggataaaaatggagattagagcccttttggaggaaaacgaccagaataattttcataaaaagagtatctaaatgttgcagaagagagaaactcaggtgacagaaattaactgttatcatcaaatattgcaatattttcatgtggaagagatagaataggactaatacatagacatttcgggaaaatttcatctgagcgggtggagccaagatagctgaataggaacagctcctgtctacagctcccagtgtgagcgacccagaagacgaatgatttctgcatttccaactgccgtaccaggtgcatctcattgggattgttggacagtgggtgcaggatagtgggtgtagtgcaccgagcctgagccgcgaagcgcaaggggtcaggaaattccctttcctagccaaggaaaggggtgatggacggcacctggaaaatcgggtcactcgcaccctaatactgcgcttttccgatggtctgagcaaacagcacaccaggaggttatgtcctgtgcctggctcggagggtcctacgctcacagagcctcactcattactagcacagcagtctgagatcaaactgcaaggcggcagcgaggctgcagcgggggcgcctgccattgccgaggcttgagtaggtaaacaacgcggccaggaagctccaactgggtggagcccactgcagctcaaggaggcctgcctgcccctgtagactccacctcgggggcagggcatagcgaatcaaaagtcagcagaaacctctgcagacttaaatgtccctgtctgtcagctttgaagagagtagtggttctcccagcacgcagcttgagatctgagaaccgacagactgcctcctcaagtggggccctgacccccgagtagcctaactgggaggcaccccccagtaggggcagactgacacctcacacggccgggtacccctctgagacaaagcttccagaggaacgatcaggcagcaacatttgctgttcaccaaatatctgctgttctgcagcctccgctgctgatacacaggcaaacagggtctggagtggacctccagcaaactccaacagacttgcagctaagggtcctgactggtagaaggaaaactaacaaacagaaaggacatccacaccaaaaccccatctgtacgtcaccaccattgaagaccaaacgtagataaaaccacaaagatggggaaaaaacagagcagaaaaactgaaaattctaaaaagcagagtgcctcttctcctctaaaggaacgcagctcctcaccagcaccggaaaaaagctgaatggagaatgactttgacgagttgagagaagaaggcttcagacgaccaaactactccgagctaaaggaggaagttcgaacccatggcaaagaagttaaagaccttgaaaaaagattggacaaatggttaactagaataaccaatgcagagaagtccttaaaggacctgatggagctgaaaaccacggcacgagaactacgtgacgaatgcacaagcctcagtagccgatttcgatcaagtggaagaaagggtatcagcgatggaatatcaaatgaatgaaatgaagcgagaagagaagtttggagaaaaaagaataaaaagaaacgaaaaaagtctccaagaaatatgggactatgtgaaaagaccaaatctacgtctgattggtgtacctgaaagtgacggggagaatggaaccaagttggaaaactctgcaggatattatccaggagaacttccccaatctagcaaggcaggccaacattcaaattcaggaattacagagaataccacaaagatactcctcaagaagagcaactccaagacacataattgtcagattcaccaaagttgaaatgaagttttagaaatgttaagggcagccagagagaaaggtcgggttacccacaaagggaagcccatcagactaacagctgatctctcagcagaaactacaagccagaagagagtgggggccaatattcaacattcttaaagaaaagaattttcaacccagaatttcatatccagccaaactaagcttcataagtgaaggagaaataaaatcctcctcagtcaagcaaatggtgagagattttgtcaccaccaggcctgccctaaaagagctcctgaaggaagcactaaacatggaaaggaacagctggtaccagccactgcaaaaacatgccaaattgtaaagaccatagaggctaggaagaaactgcttccactaacgagcaaaatatgctcgttatcagctaacatcataatgtcaggatcaaattcacacataacaatattaaccttaaatgtaaaggggctaaatgctccaattaaaagacacagactggcaaattggataaagagtcaagacccatcagtgtgctgtattcaggaaacccatctcacatgcaaagacacacacaggctcaaaataaagggatggaggaagatctaccaagcaaatggaaaacaaaaaaaggcaggggttgcaatcctagtctctgataaaacagactttaaaccaacaaagatcaaaagagacaaagaaggccattacataatggtaaagggatcaattcaacaagaagagctaactatcctaaatatatgtgcacctaatacaggagcaaccgattcataaagcaagtccttagagagctacaaagagacttagactcccacacaataataatgggagactttaacaccccactgtcaacattagacagatcagtgagacagaaagttaacaaggttatccaggaattgaactcagctctgcacgaagtggacctaatagacatctacagaactctccaccccaaatcaacagaatatacattctttcagcagcacacaacacctactccaaaattgaccacgtagttggaagtaaagcactcctcagcgaatgtaaaagaacagaaattataacaaactgtgtctcaaaccacagtgcaatcaaactagaactcaggattaagaaactcactcaaaaccgatcaactgcatggaaactgaacaacctgctcctgaatgactactgggtacataacaaaatgaaggcagaaataaagatgtcctttgaaaccaatgaggacaaagacacagcataccagaatctctgggacacattcaaagcagtgtgtagagggaaatttatggcactaaatgcccacaagagaaagcaggaaagatctaaaattgacaccctaacatcacaattaaaagaactagagaagcaagagcaaacacattcaaaaactagcagaaggcaagaaataactaagatcggagcagaactgaaggaaatagagacataaaaagcccttcaaaaaatcaatgaatccaggagctggttttttgaaaagatcaacaaaatagaccgctagcaagactaataaagaagaaaagagagaataatcaaatagacgcaataaaaaatgataaaggggatatcaccaactatcccacagaaatacaaactaccatcagagcatactataaacatctctatgcaaattagaaaatctggaagtaatggataaattcctcgacacatacaccttcccaagactaaaccaggaagaagttgaatctctgaatagaccaataacaggctctgaaattgaggcaataattaatagcttaccaaccaaaaaaagtccaggaccagatggattcacagccaaattctaccagaggtacaaggaggagctggtaccatacctactgaaactattccaatcaatagaaaaagagggaatcctccctaactcattttatgaggccagcatcatcctgataccaaaggttggcagagacacaatgaaaaaaagagaattttagaccaatatccctgatgaacatcaatgtgaaaatcctcaataaaatactggcaaaccgaatccagcagcacatcaaaaagcttatccaccatgatcaagtgggcttcatccctgggatgcaaggctggttcaacatagcaaatcaataaatgtaatccagcatataaacagaaccaatgacagaaaccacataattatctcaatagatgcagaaaaggcctttgacaaaattcagcagcccttcatgccaaaaactctcaataaattaggtatcaatgggacgtatctcaaaatcataagagctgtttatgacaaacccacagccaatatcatactgaatgggcaaaaactggaagcattccctttgaaaacgggcacaagacagggatgccctctctcaccactgctattcaacatagtgttggaagttctggccagggcaatcaggcaggagaaggaaataaagggtattccattaggaaaagaggaagtcaaattgtccctgtttgcagatgacatgatggtatatctagaaaatcccatcatctcagcccagaatctccttaagctgataagcaacttcagcaaagtctcaggatacaaaatcagtgtgcaaaaaccacaagcattcttatacaccaataacagacaaacagagagccaaatcatgagtgaattcccattcacaattgcttcaaagagaataaaatacctgggaatccaacttacaagggatgtgaaggacctcttcaaggagaactacaaaccactgctcaatgaaataaaagaggatacaaagagatggaataacattccatgctcatgggtaggaagaatcaatattgtgaaaatggccatactgcccaaggtaatttatagattcaatgccatccccatcaagctaccaatgactttcttcacagaattggaaaaaactactttaaagttcatatggaaccaaaaaagagcctgcattgccaagtcaatcctaagccaaaagaacaaagctggaggcatcacactacctgacttcaaactatactacaaggctacagtaaccaaaacagcatggtactggtaccaaaacagagatatagatcaatggaacagaacagaccaatggaacagccctcagaaataatcccacatatctacaactatctgatctttgacaaacctgagaaaaacaagcaatggggaaaggattccctatttaataaatggtgctgggaaaactggctagccatatatagaaagctgaaactggatcccttccttacaccttatacaaaaattaattcaagatggattaaagatttaaatgttagacctaaaaccataaaaaccctagaagaaaacctaggcagtatcatttaggacataggcgtgggcaaggacttcatgtctaaaacaccaaaagcaatggcaacaaaagccaaaattgacaaatgggatctaattaaactaaagagcttctgcacagcaaaagaaactaccatcagagtgaacaggcaacctacagaatgggagaaaatttttgcaatctacttatctgacgaagggctaatatccagaatctacaatgaactcaaacaaatttacaagaaaaaaacaaacaaccccatcaacaagtgggtgaaggatatgaacagacacttctcaaaagaagacacttatgcagccaaaagacacatgaaaaaatgctcatcatcactggccatcagagaaatgcaaatcaaaaccacaatgagataccatctcataccagttagaatggtgatcattaaaaagtcaggaaacaacaggtcctggagaggatgtggagaaataggaacacttttacgctgttggtgggactgtaaactagttcaaccattgtggaagtcagtgtggcgattcctcagggatctagaactagaaataccatttgacccagccatcccattactgggtatatacccaaaggattataaatcatgctgctataaggacacatgcacacgtatgtttcttgtggcactattcacaatagcaaagacttggaaccaatccaaatgtccaacaatgatagactggattaagaaaatgtggcacatatacaccatggaatactatgcagccattaaaaaggatgagttccatatcctttgtagggacgtggatgaagctggaaaccatcattctcagcaaactatcacaaggacaaaataccaaacaccacatgttctcactcataggtgggaattgaacaatgggaacacatggacacaggaaggggaacatcgcaccctggggcctgttttggggtggggggagggtggagggatagcattaggagatatacctaatgttaaatgacgagttaatgggtgcagcacaccaacatggcacatgtatgtatatttaacaaacctgcacattgtgcacatgtaccctaaaacttaaagtataataaaagaaaaaaagaaaaaaaaagaaaatttcatctgagtgtagttgttagaactgtccaatctagaacaagttacctcaggatatgtaggaagttccttttagcctgaatgtacttacagaagctaacttcttttcaaggatattaaagaacatcaaagatgagataagtaatgggagtagaagaacttcaggtttcttatagctttcagatttaaaagttctagattacaaactccaaatctcttgtttccttatctgtaaatttattggtggcctgggctctgtgtcgtttgttcctttttactcttaggtaatagctacctactgaatccaaaaacctgatagataatggacataacagtctcaggtgtttttaactattttcttaatgaaacagaacaagtgtaactagaatcagtaatggaataattttgctagaaagctccttcctatttttatatttctggataatgtattatctcgatttgttgagaaaaaaagccagcaagaatgctgaaagaaatggctaacagaatatttggtctttaacttaggcgtattctgggttacatgatttagagcagaatctgtgtcttacaattagaaagattttgaatatttgatagaagtgtatttgggttccattcaaaaatggatttcgtaagtggctgtgttgtttttcatgttataaagtagaaaggaatttgaaaggtagcatgcttcctatggtaatttcttcctgcagcatcctctttttttctgcttccagcagtcttttaaatgaatatgcagtaaatttttggttttcaattgagaagatatttaaagtccattataagaaagtgtaattggtgagaataacttcattccatcatccctatgagcaaaaatttgcatgtgtaccgtgaaatatttagagatagaaaattgcatagaatcaggccttgaaatctcagtgttacctcagtttacctttttatctagggagctttccctacggcctcattttggatctcttggtaactctccagagaagtttgatactgggctaccctgtatcctttttatcttttaatatggtgggaaattgatctaagtcttgtatccgtgtgctgggataattggctagccacatgtaggagaatgaaactggatcctcttctctcacgttatacaaaaatcaacttaagagatggattaaggacttaaacctaagacctgaaactataaaaattctagaagataacattggaaaaacccttctagacgtttgcttaggcaaggatttcatgaccaagaacccaaaatcaaatgcaattagaacaaagataaatagctgggacctaattaaactgaggagcttttgcacggagaaaggaacagtcagcagagtgaacagacaacccacagagtgggagaaaatcttcacaatctatacatgtgacaaaggactaatatccagaatctacaacgaactcaaatcagtaagacgaaaacaatctcatcaaaaagtgggctaaggacatgaatagacaattctcaaaagaagatatacaaatggccaacaaacatgaaaatgtactaaacatcggctgggtgcggtggctcacgcctgtaatcccagccctttgggaggccgaggttggtggatcacaaggtcaggagttcaagagcagcctggccaagataatgaaaccttgtctctactaaaaatacaaaaaattagccaggcatggtggccggcgcctgtaatcccagctactcgggaggctgaggcagagaattgcttgaacccgggaggcagaagttgcagtgagccgagattgtgccattgcgctccagcctgggcgacagagcaagactccgtttcaaaaaaaaaaagaaaaaatactaaacatcactaatgatcagggaaatgcaaatcaaaaccacaatgtaataccatcttacttccacaagattagccataatcaaaaaatcaaaaaacagtagatgttggcgtggatgcaatgaacagggaacacttctgcactgctagtgggaatgtaaactagtactgccactatggaaaacagtgtggagattccttaaagaactaaaagtagaagtaccatttgatccagcaatcccactactgggtatctgtctacccagagggaagaaaaggtcattatttgaaaaagatacttgcacacgcatgtttatagcagcacaattcacaattgcaaaatcgtggaaccaactcaaatgcccatcaatcaacaagtggataaagaaactgtggtgtatatatgtatatatatgatggaatactacttagccataaaaaggaacgaattaacagcatttgcagtgtcctggatgagattggagactattattctaagtgaagtaactcaggaatggaaaaccaagcatcgtatgttctcactgatatgtgggagctaagctatgaggatgcaaaggcataagaataattcagtggactttgaggacttgtggggaagagtgggaggggagtgagggatagaagactacaaataaggtgcagtgtatactgcttgggtgatgggtacaccaaaatctcacaaatcaccactaaagaacttactcatgtaaccaaataccacctgtaccccaataacttacggaaaaatataaataaaccttgtatccatgaatcaagttaatttcagtcatttcatttgaatcaattggtaaattgtttaatttgtattaatttcttgactgttgatgtaaatagtgactaatacacagagatttgatgcctctcaaaaataacatgctgaggaaatacaacaaaaacagattttggactactattttctatgaatatttaaaaagtaaatgatgttcatgctttatctggagtcctgatcagaagttagtaagtttattgccatattgaaaaaaattttaatcctgttgctccgtaactctgattagtattttattaacaaatcagagttagatttctgtgttctcaaaattaagtgcagttcccctcatacattgctagtgaaaatgaaaagcagtacagctgctttggaaaagtttggcagtttcttaaaagttaaacatagaacaattaccatctgagccagcagttctactcctaagtatatcttaagaacatggaaagcctaagtctacacaaaaacttttgcaccaatgttcatagcaacattataatagtcaaaaagtggaaacaacccaaatttctattaactgatgaataaatagattaaatgtggtatatctatacagtggaatatcatttggcataaaaaaaagattgaaccttgaaaacattgttctaagtgaagtaaggttgtcacagaaagctataaatacatatgattccacttataagaaatgtccaggtagacaaactcatggaaacaaaaagtagattggtggttgccaggggatggggaagtggggaatgtagaatgactggtgatgagtataggttttcttttttgcatgataaaaatattctgaaattaggtcatggtgatgtttaaacaaccctgtaaatactctaaaaaccactggctcttgtgtattttaaaagggtgagtttcatagtttgtgaattatatttcagtatagctgtataaaattaaatacatttaagtgtggaacacaatagctgttgtgtgtgctgtattttattccttaaatttaaaaatcccaaattaaattttcttcttctttagaggaataactcccttcctgatgagaataatattgcaaggcttcaggaagaactcattgctgtgaaacttagagaagcagaagccattatgggtttgaaagaacttagacagcaagtcaaggatttagaggaacactggcaggtatattaatatattttgtgtgcttttttaaaagagagtaaaaccgaaatatccaatttgtaagagtttgaagtacctgatgacctatagtagatgagtttaaagtgagagagaccctgtttaatgtcaaaattgagagtatttataaactgaaagtgcacttaagctgtttctccctctttaattcttataataaaataaaagatacagtagacatcagataatatttttgtcattgtaccattgtgccttgtgtaactttttctgcaaactgtgaaagtgttctatataatacatattttgtcttaaactttgatattaagtccattgttggttagtgtgaaacaccagaagggtgacaacattataaatttaatgtataaattagtaacttagttacctcaccagataaatgacatttatctggtatgtgaccacaaatttattcatgtatgagggaaatgttgacaaggaacaaaatacatattctatataaggaccgaaattaggccttgacattgtcatgcctttttttaaaacatgttttgacaaagtatcagattgcaataaacttgaaattttaaaacaaaaaagacaaaacttgtcttttatcacagatattttgagaaacactgcccttaacttctaacattccttccttaatggccccattttttttctaatgtattgggatttcattgaagataatatgaaaaatctctcattaaaaaaattacagtgaaaattgtaatcttttcaagaattaatcctcagtatatagagaaaaaatttgaactgtatttgagtttatatcccagatctgcactggctgtgtgtgatcctcctaaagttacttaatcacagtgttcattttcttacctgtgaaaagccaaaaatgtttccacacacattgccaaatgtcccctggcggggcaaaattgccccagttgggaaccaataatggcaataatgtgaatgatgcttcctaaagttgtttaatatggtgaccctaggcagtgaattctaaaattgcctgtctttcttctcaggtctctcttttctccaataaattcttttttttttttttttttttttttttttttgaagtagagactagagacagggtttcaacatgttggccaggctgatctcaaactcctgacctcaggtgatctgcccgccttggcctcccaaagtgctgggattacaggtgtgagagccactgcgcctggccaataaattctatcttaaatatacttaagatctgcaaaggtctttttatgaaacccttttattcagatgataatagtgcctgattaataggattttctagggattaaataaaataatgtgtggaaagtgttttatatatcacaggcctgaaataagcgctcagtaatattagctcttattttgatactgagagtatttgttgcaatataattttttatgctttagcgccacttagctcgtactactgggagatggaaagacccacccaagaaaaatgctatgaatgagttacaggatgaactgatgaccattcgacttagagaagctgaaacacaagcagaaataagagaaataaaacaaaggatgatggaaatggaaacacaggtatgatgggaaagcccagtatctttaaaaagtatcattagctgatcaagggtttgtgcacagattgtatcatccctagaacagagataaaaggtaaagatatgaagctgtatagaccgcagttttctagcccaaatgaagatggcaaaaaattattatattggatttcagagatttaatccttctttgacccattcaacaaagttcaaggaagtcaaattttatttgacttttttgggtaaaactcatagcattgccctgttgcatgacttgagaaggaacaccatgcagagcaaaatttctcaacctcaacacttttaacatttttggctagaagatactttgttttacggagctggtccatgcgttgtagatgtttagcagcatccctggcctctacccactagatgccagtaacggctctcctacctcaggttgcgatgaccaaaaatgtttctgcacacattgccaaatgtcccctgggggacaaaattgccccaattgggaaccacagatgtatactataatgtgaatgatgcttcctaaagttgtttaatgtggtgaccctgggcagtgaattcaaaattgcccttctttcttctcaggtctctcttttctccaataaattctatcttaaatatacttaagatctgcaaaggtctttttatgaaacccatttgcatggtaaaggcacatttggttttcatgtggtacatttgtttggaccatattcttatactctgtgaatgttgttttttggcttttaaagtatttattcagtcagtagggggcatacttaactcatacatcattctgtattccagtgcaaaatgatcataatctcaaacatggtaacatgaatatgtaatttcttcagaataaatatatcttgttttacattgttcaaagttattttcttatatttttcttgtattattctatataaaatactttccacacgttattttattcagtataattaaaataggaagaggtactattgagattatgaatagtagaaatcttaagttttacaatgggaagttttatttttgtaatcagattttattttagtatagatactaaagatgaaatacacagcttttaagccattgttgaggatttatttcacagtgggtagaggtgaataaatcaaatccagtagacatgattttgagaacttgtgaaacacaaagcactgtctcagccattaaaggacttacacttgagaaatcaggtatgcatagactatatttaatataattcagaaatttggtaagtagagagttagataggaattgctacggagactaggcggggaaaattaatttcaactaggtggtttggagaaagatttcctaaggaatttgtattgtgcttaataccattgctgactaataagtgtgattttggatggattttgctggaagcaggatggtaataggcactggttcctaaatgccagtatttggactggtggtaatccatgaaatttttacattgataaatgaaaaataaataaataaaaatagtatagggtaatggtggtggtgtgtagtaatctaaagattattgtatcaaacacccatgtatttagattaagaaatttgtccatgtttatacatgtaactccagttctgtcattttaaggacttttagaaaagtctgtcagtgactatacctcaatttattgatccactctcctttttgctcttgcaaacagtgctactctgaacattcttgcttatgtttccttgtgtatatcttcaagagtttcttaagtacaaaggttcttaccgtttttgtgtttgtgtctgctatcaacactgttggcagtctggaacctgtggaccccttcttaaaataatattttttaatgcgtaaaaccaagtacaaaggattgcaaaggaagccacttctactgaggtacagttatcaaaatactaaaaacatgtttgtgctgtagatcacatagagatacaacacattcccattgctagattcaggtttttaatattttagatttagatttctttttttttttaatttttattttttagacggagccttgctttgtcgcccaggctggagtgcagtggccagatctcagctcagtgcaacctctgcctcccgggttcaagctattctcctcctcagcctcccaagtagctgggattacaggcgcccactaccacgcctggctaatttttgtatttttggtagagacggggtttcaccatgttggccaggctagtcttgaactcctgaccttgtgatccacccaccttggcctcccaaagtgctgggattacaggcgtgagccaccgtgccctgccttgatttagatttcttaagataaattgtactacattttttcccatcttaatttcagtttatgtgtttatatctctgataaacaacatatagatgggtactttttaaaatgcagtctgataaatgattgttcaactctcaataggctaaaaaccactgaatatatgtacacttgagggaggtcaattttataatgtgtgaaaagtatctcaataaagctataaaaactggctgggtgcagtagctcacgcatgtaatcccaacattttgggaggccaaggcagttggatcccataagacaagaagtagacaggagtggtagtgggcgcgggtaatccccatctctactaaaaatacaaaaaaattatccaggtgtggtggcacatgcctgtagtcccagatatnnnnnnnnnnnnnnnnnnnnnnnnnnnnnnnnnnnnnnnnnnnnnnnnnnnnnnnnnnnnnnnnnnnnnnnnnnnnnnnnnnnnnnnnnnnnnnnnnnnnnnnnnnnnnnnnnnnnnnnnnnnnnnnnnnnnnnnnnnnnnnnnnnnnnnnnnnnnnnnnnnnnnnnnnnnnnnnnnnnnnnnnnnnnnnnnnnnnnnnnnnnnnnnnnnnnnnnnnnnnnnnnnnnnnnnnnnnnnnnnnnnnnnnnnnnnnnnnnnnnnnnnnnnnnnnnnnnnnnnnnnnnnnnnnnnnnnnnnnnnnnnnnnnnnnnnnnnnnnnnnnnnnnnnnnnnnnnnnnnnnnnnnnnnnnnnnnnnnnnnnnnnnnnnnnnnnnnnnnnnnnnnnnnnnnnnnnnnnnnnnnnnnnnnnnnnnnnnnnnnnnnatacatctttcaagagtttttttagtggttgttccaggttttacaataaatagagtttaccttcaaataataaattataaataataataaatgaataaataactatacacttcatgtgtaatctaaggctcttacaacagtgtgttttcaaatctttctacctcttttgtgaaattgtcatacattttacatattgtccaaatatatatgctactaattttgcattaaagttttctttcatagaaattgaaaaacttttaatgaaatgtgtttttccttcaagatattctgtttcagcactctttctttgtgcagatccatgtttctgtctggtatcttatcttttctgctttaagaagttcttttatcatttcctttagtgctggtttttgtttgataaaatgtttatttcttcaattttaaaagatatatttgcaggatattgaattctgccttgacagtttttttcttttaacactttaaatcactctgctatcttcttgtcagaaaccatgccagccaggattctgttgtaattcttatttttgttcctcaacatgtaatgtattttttcctctggttgccttcaagcttttctctttgtttgtagcaggtcgaatatgatatacccagatctgggtttttttttctctcttttttttttttctctgagtttctttgatttatagatttgtgtatgccacaaattttggaaacttcttggttgttatttctttcttttttttttttttttgagatggagtttcactcttgttgcccaggctggagtgcaatggtgtgatctcagctcaccacaacctcagccacctgggttcaagccatgatcccctgcctcagcctcctaagtaactgggattacaggcatgtgccaccacacctggctaattttgtattcttagtagagacggggtttctccatgttggtcaggctgttctcaaacttccgacttcaggtgatccgcccgtctcggcctcccaaagttctaggattataggcgtgagccagcacgcccggcccttggttgttatttcttcaagtatttcttctcatgctcccttcttgaggggtttcaattatacatgtgttagattgttcaaggttgtctaacaactcttggttgctctgttctttttgcccctatcatttttctctgtgttttcagtttccattgactaaaacatttttaccgacaaattattaagttcactcattctttccattgctttgtcaagttgtttgatgagccaactgaaggtattctttacgtctgttactgtttttcatttctagcttttctttaacaaaaaaaaaattttttttttttcaaagagaaaaggtctcactgtgttgcccaggtctcgaactcctgagcccaagtgatcctcccatctcagcctccccaaagtgctaggattacagtcacgagccactgtgcccagctcatctctagcttttctttttgactcatagttttcatttttctgctattacctatctaattttatgtttttcacctttcccttagagcctttagcatattaatcacagttattttaaattctctgtcagatgttgtattagtcagggttctctagaggggcagaactaataggatatatatatatatatatatgggagtttatttcaagtattaacttacatgatcacaaggtcccacaataggctgcctacaagctgaggagcaagaagtgccagtcaaagtcccaaaacggaagagcttgaagtccagtgttcaaggacaggaagcatccaggatgggggaaagatataggctgggccagtctctccttttcacatttttctgcctgctttatattcactggcagctgattagattgtgcccatcagctaagggtggatctgcctaccccagcccactgactcaaatgttaatctcttttggcaacaccctcacagacacatccgggatcagtactttgtattgatcttggatactaactcagtattaaccatcacaagtccaccccttgtcagcttgaacttgaacctatgcacatctcctgagatcatacataatcttcaaataaagacaataatgaggtaataattatgcctaacataatacaactatcctttgtacacctggaaacacaccaatccctgactcaaatactattacataaagttaacagtacttaaatgctgatatgaagtcaataaatcttatgtcacatgataaaatatattttcttagtacaaatgtatacatacacaaacatgattttaacaaaagaaggaggaaatactcatgacaattacagtccttgtttctgcagctggtcacgtagtggtatctggtattaatgactaaccttccgttacccattctgtattccctttgccttcagcaagcacctcagcaggtcatgttttttttcctggtggagtgacccaaaccttcattcctgaggggtctgggccatctgtagtcctgcctggattgggatgttgtagtttcccattgaccttaatcacagggcatggtaatactaagatgccctgatggatctcctgtattccatgcatactcttctttacctccgttgtggattagcagactgatttcatcttgatagtccgggtcagtcatcccagccaacactgtaattcccttcttagcttgttgacttaaaggtaggaacagcccgaagtgtccaggtggcaatcttaacttgcagtttaatggagtcgttgttgtgtcttctggtggtagcgttcctccctctggaactaagacctctaggccagcagaattaatgttgagggaataggaagcaaaaattttgctagtgggtcactaggggtgatggtgagtggtgccacttgcacttccaccccttgattcctggacccgtgaatcgtggctatgggagaaacagtaccatatgttggatgctgattcagagcatacatggccttctggagaactttgccccagccctgcaaagtattgtcacctagttgacattgtaattgtgacttcaaaagcccattccaccattctatccatccagctgctttaggatgatggggaacatggtaagaccagtgaattccatgaacgtgagcctactgcaacacttctttggccataaagtgagtgccttagtcagaggcaatgctgtgtggaataccatgatggtgtttaaggtattccgtgagtgcacagatggtggtcttggcagaagcattacatgcaggataggtaaacccatatccagagtaagtgtctattccagtgaggacaaacctctgccctttccatgatggaaaaggtccaatataatcaacctgccaccaggtagctagctgatcaccgtgaggaatggtgccatatcaagggctcagtgttggtctctgctgctgggaaattgggcacttagcagtggctgtagccaggtcagccttggtgagtggaaatccatgttgctgagaccatgtgtaacttccatccctgccaccatggccactttgttcatgggcttattgggcgacgatgggtggcttggaaaagaggctgagtggtgtcctcagaacaggtcatcttatccactcaataattaaactcctcctctgctgaggtcacccgttggtgagcactcacatgggatacaaatgtcttcacagattttggccactcagagaggtccatccacatacctcttctccaaatttctttgtcaccaattttctaatcatgcttctttgaagtccctgaccatccagccaaaccattggctacagcccatgaatcattatataatcacacatctggccatttctacttccatgcagagtgcacaaccaagtgctctgctcgaagttctgcccactgggaagatttaccttcaccgctgtccttcagggatgtcctagaaaggggctgtagtgctgtggctgtccactttcaggtggtgcctgcatatcgtgcagaaccatctgtgaaccaggccctggtcttctcttcctctgtcagctgatcatagggaactccccatgaggccatcagtgcgggctggagaagagaagacagggtggcaggagtggagaccatgggcatttgagctacttcctcatgaaacttacttgtcccttcaggacctgctcaagcctgatcacgtacataccacttccatttgatgatggagtgctgctgtgcacagcccacttcatggctagatgggtcagaaagcacccagttcatgataggcagttcaggtcgcgtggtgacttgatgacccatagtcacttcatgactatgatgaacaatggttcagtttccaccaaagtccagtaacaggccaacagctgtctctcaaaaggagagtagttatctgaagaagatggcagggtctcgctccaaaatcctagaggtctctgctgtgattcacctatgggggccatgaatctctgtttttataattcaaattagtattttgctcatttgacctagaagttttctgcttgtataaattaagtaggaatgagcagacttcctatcaatttcacttctaggaacaccgtgattaattagccaatgccagagctctacacaagtcagactattctgattgccgctttgccgctgctgttcatgacagtagctatgcctaccttgcgtttgatggttgagtgctgccacttggccccggcacctcagtattcaattattcccattgtatttaaattttgtagttgagtaactgcggttcccaccattagatctgacatactaagaagagcaattacaggcctcttcaaagatgcaggtgctgccctcacaaatctatttcaaaaggcattggtcaagagtacgtcttctggaccctcccagctgagatgagtaggtctaaagtgactaatccactccaccatcccagtctccctaagcctttggattccatcctctacattaaaccaagggagatcaggcgtttccagctctctcacagtgggccatcttctagtccgtctttcaactaaccaagcaaataaactattagaaccttttttaactccccaagttgcaacattgaatgcagaatccctacttagtgggcccaaatcaataaattcagcctgatccaactctgttccttccaccattatcccatacccttaatatccattcccatggtttgttttccagatttctgtttatataaattagagaacttggtttttttcaagtgtagcacacctcctcatgggtcacactcaacctcaccctctagggtcccactgagactttaacttagttataggtctagaagcaaacaggtgttgggggtggctcctgaggagaatcaacattatcttccctggcaactgcctcaggggagggcatcaatgttgcctcaagcagcgcagggttcatctcctcagacaaaggcagaaaggctgatggcagcatgggttggggaggggttgtttccactactggggatggggaagttgttccttctgacaaaaaaggttcatcagagtttacaaacctctatgtccccagcttcatcagggtcctcccacatgtccccattccaagttttagggtcccattcttttccaatcaatgccctcactttaacagtagacacctggcaaggctgtgcatgcatctttcgttgcaggtcagccactcgcatgaagagcttgtgactgtctactctcattcagggcaatcttagcagatttgaggcgtagtatctgcttctgaagcagggggacagaatcccctgaattcatcattttctttcatcaatttgtccagtgaacttaggagcaaccaaccaacttcattacattccttggttctccacatatagtcaaaggtattatgtatagagtcactaaactgcttgcctctcacaaatagtaaatcaggagtgtcaaatgcatttattttgcgtaactctctacaaacagttcatgccaagaactatcagtgtgctccatactgttagaagtagagtccttagcatttttgggtcttaccgtattaagcagccaactccagaaacccccaaaccaatttaagaactccatccttaatattctgttcctctagaaccactcctggtaccaaaatctatattagtcagggttctctagagggacagaactaataggatatatataggaataataggatatatatatatatcctatatatatatacataaaatataacataaaatacatgtatattatatataatacacatacatatatataactcatatatatatatatgagtttattaagtattaacttacacgatcgcaagatcccacaataggccgtctgcaagatgaggagcaaggagagccaatccgagtcccaaaactgaagagcctggagtctgatgtttgagggcaggaagcatccagcacgggacaaagatgtaggctgggaggctaggccagtatctccttttcacatttttctgcctgctttatattcgctggcagctgattagattgtgtccaccagattaagggtggatctgcctttcccatcccactgactcaaatgttaatctcttttggcaacaccctcacagacacacacaggatcaatactttatatccttcaatccaatcaagttgacacttagtattaaccatcacagatatttttaacatctgtgccatatgtaatgctggttctgttgattgctttgtcttttgggagtgctttgtttttccttgccttttcctatgctttgtaatttttttgttgaaagctggatatcttgtgtaggactgcagactgagtcaaatagtttttctgcctggaaatgggcacatttttccttctgctaggcctttaaagtgggagattcaagttaatatagtccagagatgggttgagtttgaggtttgttgtttctgtggtatcatcagtgcaccataggcttcaaattcccttagcaatactttatttttcccttagtaataccttatttttagagtaggagctgtttgccagaggaattttgtgtctttaggttttccctttgcataacattttaaaagggtctgtcttcagcagtattccatttgttacttattacagaagagttggaggggcaacagtgttttctattgttctgatgaagcctcagtcttagacaggcacagtggctaatgcctataatccccaacactttgggaggcccaggcaggaggatcacttgaggccaggagtttgagactagcctgggcaacatagtgagaccctgtcttgtataaaaatttttaaaaattagccaggtgtggtagtatgtgcctgtagtcccagctacttgagaggccgaggtgggaggatcgcttgagcccaggagtttgaggctgtagtgaactatgacacctctgcactccagcctaagccacaaagtaagatcctgtttctaaattaaaaaaaaataaatggctgggcgtggtggctcacgcctgtaatcccagcactttgggaggctgaggcaggtggatgacctgaggtcaggagtttaagaccagcatggtgaaaccccatctctactaaaaatacaaaaattagccagacgtggtgctgtatgcctgtaatcacagctacttgggaggctgagggaggagaatcacttgaacctgggaggcagaggttgcagtgagccaaggtcgcaccattgcactccagcctgggcaacaagagtgaaactctgtctcaaagaaaaaaataaattaaataaataaataaataaattcagtcttaggcttcattatgtcctttgatctggtgtgtttggtctttagtgctcctgcccaccccagatgtagtactaggcacaaaacgcagttctgccccttccccaagatgcaatggctttcaccagtgccccaaagacagcagcgtttcttggccctgatccacacagatgaaagcatatattccctagaggagacaggcaaggtttagcgccttcctatagtgactgctattccccttcttgagtcctgtaccatgaaggtttctttctcaagactcaccagtcttttgtgtgtgtacccgttggggtacctgaagaaaagtgtgcaagagtttgtgaacttagactctaagtctgctgcctcctgcgccttcacactgtctagccagccaatacttagcttccaccagtctgatatttattctagctgtatcattcttagcttgtggccgtatctgcctcaggtgagaaagtgcttaaatcccattgcatctctcctggaaggctccgggtttgaacttagtttggctggctttttttttttttttcctttttttttttttttgagatggagtcttattctgtcacccaggctggagtgcagtggcgcgatctcagctcactgcaacctccgcctccggggttgaagcgattcttctgcctcagcctcctgagtagctgggactacaggcgcatgctaccacatctggctaatttttgtatttttagtggagacaggggtttcaccatattggccaggctagtgtcgaactcctgacctcaagtgatcctcccgcctcggcctcccaaagtactgggattacaggcatgagccactgtgcctggccttccttcttttttcattggaagggtaggagcagttctttgaccttctacatcccagatcacaaatcaaaagtcctgattatgatgtatttgtgattgttttgtttggtacttttggtttctttcttttttgttccttttttcttcctttcctcctctttattggatttagttttttctttcactttctctgtactggtttgactcttataattccttttgttttctattaatgtttgctacctgaaaaaaattgaaaatgcttacctgggtgaacaaagtctaaacttagtcatcatctctgtatcctttccaaacatttagaagggcctgtgaataacttcatgtgttcttctgtcttacaagttattattgtacatcttttaatacctccaaactactagatattattattttatggagtcagagcttatctggatttgttcacctgttagtcagttatttttgctctgaattcttttttttctatttaatttttttttcttttttaaatagggtctcactgttttgtccaggcttgagtgcggtggctgttcataggctccatcgtatctcactacagcctcaagctcctgacctcaaacagttctcctgccccagcctcccaagtagctgggactacaggctcttctctcttcttatatttgacagtttctggtttccatcctgcattctaaatctgtcactctttttttttttttttttttgtgacggagtctcactctgtcacccaggctggagtgcagtggcgcaatcttggctcactgcaagtcctgcctcccaggttcacgccattctcctgcctcagcctcccgagttgggagtacaggcgcccgccatcacgcctggctaattttttttttttttttttagtagagacagggtttcattgtgttagccaggatggttgcaatctcctgaccttgtgatccgcctgccttggcctcccaaagtgctgggattacaggtgtgagccaccacgcccggcccactttcttaaaataaatttacttttctttcttgtatgatagtttagctcagtatactactatagggtgaagattcttttttaagcattatgaatttttgccattgaaatatctgctagacatttcattacccttcctttatagatctcagtttttcccttgatttgcctctttagcattctaagttttgttacagtatatattggtggggatttatttgtttttatcctggttggaactagttgtgtttcctaaattgtagatttatatcttttatttcttttttttttgggggatttatttttttatttttattttttattatactttaagttttagggtacatgtgcacattgtgcaggttagttacatatgtatacatgtgccatgctggtgcgctgcacccactaactcgtcatctagcattaggtatatctcccaatgctatccctcccccctcccccaaccccacaacagtccccagagtgtgatattccccttcctatgtccatgtgatctcattgttcaattcccacctgtgggtgagaatatgtggtgtttggtttaattgtaaaaaattctcaactgttaccatctcttaaaccatcatatctcacttttttttttctattttatcctgcaacccatattaggtatattttggaccttattctcttttctgtgtctaataacctcttctgggacactaattatttcttcagtatagctaatctccaatctaacccattcattgaattcagtggctgtatttatagaaattttctttggttatttttctgatttgcttaattttttttgatagtgacttgttctttgcttatgttttggcattttccttttatgtcattaatactgtaattttagacataacctatgttaggtaaagtcctataattatctctagagttcttaaaatatattttttctgtctgctgtctctcactcatggtcaattcttgggttttatgtgtattatttatcaaccataatgttgaattatggtcttgtgttcagggatgcagggaagggttttatctatggacattatttgcagcttatgtcaaagatgggtccctctgaagtgtagttatttgttttaatggtagcaggtaagacagtaaaaagaggctgtgatacattttgaatacggcactaagaagtttagttaattttgtagacagacttatttgttgattcaaaatgagaaagaggccaggtgcagtgactcatgcctgtgatcgcaggattttgggagaccaagatgggaggatcacttgggctcaggagttcaagactggcctgagcaacatagtaggacctcgtctctactaaaaataaaaaaaattatctgggcgtagtggcacatgcctgtggtcccagctattcaggagaccgaggtgggaggatagcttgagcctgggagattgaggctacaagtaagctatgattgtgcctctgcactctagcctgggcaacagagcaagctcctgtgagaccctatctaaaaaaaaaaaaacaaaaaagagagagagaatgagaacgactagagtatgtgttacaggaagacaagtaaaagtaaagatgaagaaagttctaagtggttgaaagttttggagcttacatctattagatgatctacattttttcattaaaactggaggggggtctttttcatagggcgaggtaaagtaggtataataatggcaacaactgaacatttattaagtatctaaaatttcccgggtgcagtggctcatgcctgtaatctcccagcactttgggaggctgaggcgggcggattacttgaggttaggagttcgagaccagcctggccaacatgatgaaaccctgtctctactaaaaatacaaaaattagctgggcatggtggtgggtgcctgtaatcccagctacttgggaggctgaggcaggagaatcacttgaacccaggaggtggaggttgcagtgagccaaggtcgtgccactgcactccagcctgagcaacaaagtgagactgtctcaaaaaaaaaatgaaatgaaattacatgacatgacatgattgtgtgagactgctttcataaacttttcgcccataatctaatcttcacaacatagtctcaaaaggcaagtagtactatctctactgaaatttggtaggattaaannnnnnnnnnnnnnnnnnnnatttttacttctttctgttatgaaagtccctactatttctttcaggcctctgatagaataatttcgggttgagagaattctggctgggtcatacctgagtgtgaaaactacctcatgttagttcaaggtctatatgtttttttagcacattctgtaattataatacaataaacagctagcatttattgctacatatttaggccctgttatgcatattatctcatttaattctgaagacaccaaactgagaaatagaaactattttatatgcatttttcaaataaggaaatagagactcagagatactagcttgtttgcttaatgaccaaatattaaaaccaggattcaaaatctgtgtgcttcataaaaagagactgtgctagacattgagagcatgtagaaatacacatatgccgtattgtgtgacatcaagtttacagcccaataaatagtgatggtacctttttttttttcctttcctttttttttctctgagacagagtcttcttgtcacccaggctagagtgcagttgcgtgatctcagctcactgcaacctctgcctcctgggttcaagtgattcttgtgcctcagcctcccaagtacctgggattatagacgtgcaccaccatgcctgactaatttttgtatttttagtagatacggggtttcaccattttggccaagttggtcccaaactcctggccacaagtgatctgcccaccttggtctcccagaatgctgggattagacatgagccactgcactggccatgatggtaccttttgactggtttgtgctttctttctggaactggaaagaggaattaaactcaccattcctgtatctatccattttgtactcccattgccaatcttagaaaggaataccttcaagttgtgtataagaatttttatagtttacacctattttttgtataaatggtatattgagctatattgagagtctctaatattgacagtatgcattcctttggatgacttgattttatttatttatttatttatttttaattttttttttttgagacggagtctcgctctgtcgcccaggctggagtgcagtggctcagtctccgctcactgcaggctccacctcctgggttcacgccattctccagcttcagcctcccgagtacctgggactacaggcgcccgccaccatgcctggctaattttttttttttgtaattttagtagagacggggtttcaccgcgttagccgggatggtcttgatctcctgacctcgtgatccgcccgcctcagccttgaatgacttgattttaaaggcagttttatcttattttttaatgttgattttgttgaataacagtgacctataactagtaacatttttaataatgttatggtataaaatggataggtaattttttttaatttttaggtcttgtatctatagtctcagtatttatatttctgattattagaaccagatcaatagtaaccatcttcgaagagcagaacaagaggtgattagcctacaggagaaagtgcagtatctttctgcacagaacaaaggactccttactcaattaagtgaagcaaagcgtaaacaagcagagattgaatgcaaggtaaatatgtcaactaactgattttgttttttgtcaatataataatgccttttttttgtttgttttatcgtgattagattatcttaaaaacaaaacaaaaaagctcgtcctattttctacttttcctgaacttgttttggtagttgctttcagaccaggtcagctcatcttgcttctggggtggattttagtcaagaaacattttcagtcacttccttggttaatttaatttcctggattggcatttactagtatttctttacagtttttcttttgactggtaaccctttaaaaccagagcttttaatggcttgatcaaaaaagatgggtcatttagagaggttaggcctcctctgctttgattggtatcttattagtgggcagtaatgttaataacattgatacatgttttctggatagactagagagcaaaagaaatgtgtatgtaccagtgtgttgggaaaaatgggtatattacccattattattttaatcagttatatactttacttttttgtgaagtgtttggattcaaaaagcatcaaaagtatttgaatgcaagtacattctttcctgaaataaatttacaatatagcagtggtgagagagtgggggaaaggcagtgagatggaaggagaggagggagggtttgggtgtgtgtgtgtgtgtgtgtgtgtgtgtgtgtgtgtgtgaaataactaaagagatgactgtagactgggcattagaatggattactaaaggcaagttatgggatttaaaaaaataaactaggcatccacctttccatggtgagatagtaggaatgatgccctttaaagattccagccttattattgtataagaaataagacttttgatggcacatgtaaagctgtaattccatcagcttattctggtgacattaaaaaccaagagtgaagcttgaatggtttatcagtgtcactgaaatccagagatgaaattacatccttataaatatgcatggctgttacaatgtatactgacagaaatctgtaggcagtactgaaattcctactaaaagcacagtcacttttgaaggatatgactaaactataaataaaataatattaaatgaggttgtatcagtctgatttgtcataccaatatctgattgagtttttatgatgctaaattgtctgtgttgacatcttatagataactaaatttaatcttttatttattattggtgttagttttccttaaacatattttgataatggtgttactagattaaatattgctcctcaaatgccttagtacctgttgagcaaagtaaagtgttctttggaaataaatctttgaggaacttgctgttgaaaataataattttctttgaacttgtctaagtaatgggctcagatttagaatattagaggattttatgaactaatatgggattttatttaatttttaattgttcattaatacctctgtgaagtatgttacagatgcaaactctgatatctcccctgtgtttaagctgtgtgttaatttattcaatctttcgtgatgcctttgcaggttttgagaatgaccaatgtattgttaccctagcacctagtacattctgattaaatgtgtatgttttaccctgttatgttggaataattcgggaacaaagttaatttttcaagaaagccagtccgtgaattatgtaaatctgattcattttcatttagtattataagattatagcttatgattaatttataattattaaagcttttttatttttagttgtgtaaaatgtgtggatattgtttataatattaatgttattttccctctcaacttaatttgaatgttctcacttaaagttgaaatattacaagcctgtgaaccccagtttcaaaatgcaaaacactctaaaaccctggagttttttcataaatttcacacaaattcctttggaggcaaaacttaatttgaattgatatatggccatttataattgttatttattccacttgatgtgaacatttatatctcactgcttcgttgtatgtattgagcatattgtttcattatggatgctgccttagaccctgctagataatacttaaagtatggtttatgcaacctattacttttctaaaatctgaattccaaacacacctggtttattttgtttcggtttggtttaccacactagaataaggaagaagtgatggctgtgaggcttcgggaagcagatagcatagctgctgtggctgaactacgacaacacattgctgagcttgaaatccaggtaccatatgaaaataataaagtacatgtaaaaatatagtttcttctatcctctttgtctgaacagtaacttactctttatcctcgtgactgtgattcttttttcagtaatcattcatttccaatttttttttattgtggtaaaatagacataaaacttaccattttaaagtatacagttctgcagcattaagtatatttgacactgttgtgcagccatcaccaccatccatatccagaactttttcatcctccctaactgaacctctttgcccattaaacactaacttcccattccccagcaactggcaaccaccagcaactggaaaccaccattctactttgtctctatgagtttgaccactctggttacctcatataagtgggatcatacaatacagtcatatgctgcataaggacatttcagtgacggacagcatatatggtaatggtcccataggatgataatgaagctgaaaaattccttttgcctagtgactatagccatcattatgttatagtgcaacacattactcatgtgtttgtgatgaggctggtataaacaaacccactgcactgccactcttataaaagtgtagcacgtacagttgtgtatagcacataatacttgataataaatgactatgttactggttcatatgtttgctatactatttgttgttttgctatactaatattgctattttagagtctaattctacttatacaaaacaagagttaactctaagacagtctcagatccttcaggaggttttccagaaggcattgttttcataggagatgacagcttcatgtgtgttattgtccctgaagaccttccagtgggacaagatgtggaggttgaagatagtgatattggtggtgctgaccctgtgtaggcctaagctaatatcttattttaacacaaatgttttaattttttttttttttgagacaggatctcactctgttgcccagaccggagtttagtggcacagtcatagctcactgcagactccaactcctggctcaagcagtcctcatcagcttcccgagtacctgggactacaggcacacatgaccacacccagcttatttatttatttatttatttatttatttagtagcaatgaggtctccctttgctggccaggctggtttcgaactcctgggcttaagtgatccgcccacctctgccttccacagtgctgggattacaagcatgagccactgcgcccagccttaatttttttttaacttaaaaaattttttgttcatcaggtgtaatgactcatgcctgtaatctcagcactttgggaggctgaggcaggcatatcttgagcccaagagtttgaaaccaacctgacaaacaaagtgagactccctctctacaaaaaatacaaaataaaattagttggacctggtggtgcacctatagtcccagtcgcggttacttaggaggctgaggtgggtgggttgcctgagcctgggaggtcaaggctgcagtaagccatgatcacagcactgcactccagcctgggccacagagtaagaccctgtttcaaaaaatatatttattaaaaattaaaattaaaaatagaaaaaagcttatagaataaagatataaaaaaaaattttatacacctgtacaatgtttgctaagctaaatgttataaaagagtcaaaaagtttaaaaaattggaagtttataaataaacttacagtaagttaatttattattgaaagaaaaaccattttttataatgttatagtatatttacaaattttcttcatttttaaagctgaataatattccattgtatgtatataccacattttttatctgttcattcattgatggacatttagggtgcttccatgtttgagctattgtgaataatgctgctatgaatacaggtgtacaaatttctgttcaggtccctgctttaacttcttttgagtacgtagaagtggaattgctggatcatatagtaattgtttaatttttttaagaaattgccataccattttccacagaacctacaccattttacatttctaccagcaatgcatgaggatttcattttttccgcatttgcaccaacacttgttaattttctgttgttgtttttataagtaccatcctaatgggtgtgaagtggtatctcattgtggttttgatttgcatttccctaatgatgagctatgttgggcatactttcatgtgcttatttcgcatttatatatcttctttggagaaatggctattcaggtcctttgcttaattgaaccaggttgtttgttgtttttgttgttgagttataggagttatttatatattctcagtatcactttcttatcatatatatggtttgcaaatattttctcccattatgtttgttgccttttctttgttgatagtgtttttatcacaaaagtttttaattttgctgaatcaacttacctgggttttgttttgttttgttttttttggtggtgttgactgtgctccaagtccattttttagtgaaaatttatcatatttctatattatcaaaactatcttcaaaagaaaattcaaagctttaaaaataaatatgtttttacagggcacagtaactcatgcctgtaatcccagtgctttgagaggccaaggtcaggggattgctggaagccaagagttcaagaccggcctgggcaatagaataagaccctgtctctacaaaacaatttttaaaaattagctgagggcatgatagtacactcctgtagctctggctacttggaaggctaaggtggaatgatcccttgaggccagaagtaggagttccatattacaaggagctatgatcaagccactgcactccaatctgagtgacagaatgagaccttgtctcaaaaaaaaatttttttaataaaaataaatgtgttttgtcacttcttatgccttacttcttgtataatatgataaaagtagtaagttttccctatggacaaaatactatgtttaaaatcttatgtctttcaaagtctttaattatattgtactccaagtcacaatagtctttgctgtaacatctagaattttcttcccacctgaaatttccttttgtctttaaatttcaatttaaaatgtaattaatttccaaacttacatattatattataacttcattttttgatctggatcaaaagtaaccacaacacattatgatttgtatgtttataaaaaggtatcctttatgttctgctggtagtagtccccataaagtgcacatattcaggaaaacctcagacatgagccaactgcataatatatttgtaatcagttgtttaaatcatgctatcgtatgtgattttagcattagtctgtacttttctaaacatcaagaaaatcctaagaatttgccatatttctatacatcttaatcacaaaatagtaaaatttaaatcactctttttgttgattctgaaatatttattaaaacgaagaacctggtgtgcaggatttttgtttaaaatgaaatgtaatgtgttacattatttttgaaaaatagaaaattcatggaattttttttaacatcttccaatcctttacccctaaccccgcatctagcccctggtaaccaccattctactctgtacttttgagttcaactttttgtatcccacatgtgagatcatgtagtgtttgtctttctgagcctagcttatttcaatttcacttaaggttctccaggctcattcatgttgttgtgaatgacagaatttccttcctttttaagattgaataatattccattgtgtatatgtaaaccactttttctttattcattcatctactgatggacatttaggttggttgcatgtcttggctattgtgaataatgcagtgaacacgggagtgcagatatcttttcaacatactgatttaatttcctttggatatatacccagtagtggaattgttagatcatatcatctgtttttgattttttgaggatttacatttctacccacagtgtgtaagagttcccttttcaccacatcctctccagcacttactgtctttcatctttttgataatggccattctaacaggtgtgaggtgatagaattgttactgttattatagtaggggtatattatcatcaactggctcttgataaagtggtcactggaatcctaattgccaaatttgttgctattttttcagtatttgcctgctcatgcttattgcatttgtttttgaccatttcgtcctccttgcattctcacctcccctaactttgctaccaccacttacttttgactctcttttttcttgtttaactgttgtttacagtcatctttatcagtcgtggatgtgtgtattcctctgaaatccgaggttttggcttttacaaactatacccaaatgaagggtctcacttacatggcttcaggaaccatctttaccagggtttcccaacccccaggccacagacaggtatcagtccatggcctgttaggaaccgggccgcacagcaggaggtgagcgggcagccagcagcatactgtctgagctccacctcctgtcagatcagtggcatcattagattgtcacaggagcacgaatcctattgtgaactgcacatgtcaggggtgttggttgcactctccttatgagagaatctaatgcctgatgatctgaagtggaacagttcatcctgaaaccattctcccaccctctctatggactacgaaatctgtcactagtaccaaaaaggttggggaccactaattgttgcaacagtgaatcataatttatctccagccccagcctgtttccccttaccaataattttctaaatggtttaataatttaaaaattatgaaacatgaggtacagagaagttaataaaacaaagtacattgtatgtgtacaaatattatacataaaacttctaaccaaggttaagacagacaaaattgcctgtactcaagaagtctattcagtcacaccctgttccctatcctgacttttatgacaatcactcttttgcctttccttatgattgtgtcatcttcctatacatttctgatctatacagtttagttttcccagcttctcagttttgcatatcgccaactcttcaatctttcaaaatagaaaagtctaagtaagtataaaactaaataaaaggtaatttgagtcatttttcaaacttttttgagtctataataacatttctcttctccctaccactccgttagttcatctgcttaccccttacctgaactgttgttgtaacctcccatccagtttccttttctccagcttcagctcttctacagattaaaaaagctgtctctctaaaacatagaaatttcattgactaccttttaaataccaatcatatcgaaactccttagcataaaatcctttttattattgcccaaactgaatttgtagcttcatctctcaccattatctccccatcctcatcacctacacatacatgctgtattctgcccactgtgaattatcctattcctgcacctatcacattctttcagaattctgtgccattctgcatgttgctgcatcttcctaaattgctgtatttttctgaacttcttactcctctacttttgaagtatttctgtttctctttcaggtcttaggactgagtgctttttggctaacttgctgttaatttgcttagtaaatgagttttcagtagatgtcttaaggtttcaatatttaattatatgtatatgtctatataaatatagatatatagaggtatatttttaatacagattaagattcataaatagatctttcattaaaacctgaaacttttttcagttatcaaagtaatatattttaggttattttcttagtcatggaaatatcttagatcatattcaagttccactagggggagaactcaacttagtctaagatttttgtacttcagatgtcttcagattaactcttccaattactggtactctcttgcgagtaaaatgtttttgcacaaaccgaattctttcaaactcttcttttaataaattattatttaatctgttattcatataatgaaagcctgctttttaatgtagttatgaaaattatacttttgtaaacatctcatttagatgagaaaatacattacatgaagaaatactcatttttataaatactataacattgtaatatatagatacttacatatagatatatagtatatttatatacatgctatgtagtatatagatataggtagactgaaatttattaaatttattttcaaagattaatcagtctacttagaacttttaggtctaatttaagaattatcatctactgccatgttgttattctgacataactacatctgtaatctagttatattgtttataataatgcctcctccaccaccctgtctttgtattcgcgtcttacagtgaacttaaccatttttaagtgtagcagctttcaaattttagacattttcctagaactgtttttaaaagttactattacctagttttcttctctaaatgaatgacaattatttattggtgggttttttgctataaaattattacactgttgtgctataatgctcagttgggaacagattatacaacctgtaaaattaaggagttgaactctaaggttctatcacatataaaacaatactatgccatgtatagcatttaaatattttttgacaattctgagttaccatgaattttaattattatgtactcatctcactttattaatacctccatgactttctctttggccaaatttttaccttaaataacattcctattctagttactagactcttatgttggtttattttttcttcataacaattattacttttttcataaattatacatttctttttaaattttagatgtgggggtacatgtgaaggtttgtagataaacacatgtcatgggggtttgttgtacatattattacatcacccaggtattaagttcagtacccaatagttattttttctgctccactccctcctcctacgcttccccctcaacatatttttatttttaattttccacattccccactagagcataagctccatgggagtgcaagagtggaatttttatctgtcttattcattactatattctcttttgggcagtggtgggggagacaaggtctcaagatcacgccactacaccccagcctgggtgacagaacgagcctctgtttcaaaaaaaaggtctcactttgttgctcagaccagagtgcagtggtgtgatcatagctcactgcagccttgacctactgggctcaagcaatccccccacctcagcctcccaagtacctgagactacaggagcacaccaccacacctggctaatttttatattttgtgtagagatggaatttggctatgttgcccaggctgatctagaactcctgagctcaagcgatctgcccacctgggcctcccaaagtgctgggactacaggtgtgagccactgcacacagcctcgttgctatattgggtgcttactgtataatgtctggtacataaccgtcattcagtagatatttgtatttgaccaaatttgaccagtagatatttgaattttgacaataattcattcatcttctgatgttgtttctacaataaatgatttttaatgtatgcagttgtcactatattcacacatttatcaacttgtatatgttcttttattattaggtcactaccagttaggaaggagaaaatgaattcagcctctgtccaaatgaatttaccattacagagtaggagtgactgagcttaggtcccttctctgaaatgttttttaatggaatttaaacctctgaaaattaatgtatatttattgttggtattaatgactgtaataacatgcaagaagatgccaactattatcagaatttttttgctatcctcacatatgctttagaacccagttttctgtttgaatgtctcagtctaaaggaacttcttttagtagcctgcaaaaataaatatgacatatcttaatcagaataaagagcttcaagaaatttagttatgaagaacaagaggattttaaaatcctgaatgtctctgtggtcccaactttttgtctttttgttttcttctaattgctagagattctgtattggttaaaagaatggatttttgagtccaacctcttattagcctcttatctttgacaagttttttaatgtatttgttggttcactcattcaaaactgaggattctaaagctatctgccttatagttgttgggatcaaatgagaaaactcatgtaaagtgttctttcttgcctacataatatccggaaaaacagctcgtagaccttatgtaaaaagtcacattcaatattgtagagtccccaaaattacaaccaaactagaaagttctgaaactctttgagtttccttaaagatagtctttaacaacctcagatactgaatatatatccctttccaaaaattatataaagcctgaaattaagaattatcttggggccaggtgtggtggctcacacctgtaatcccagcactttgggaggctgaggcaggctgatcacttgaggtcaagagttcaagaattatcttggctttttgttttttctgtaatatatacttaagtaagcttctttctgtccaccatgaaaccctgtttagttacacttcattttttgtgtatttgctgtatttggaaatatagagcttattacttaacaactttaattattccaggatactaataataagagtaataatagctggcattactgaacacttggtacataccaggcagtgttctaagccatttgaggatattcacatatttaatcctcacaaaaatcataggagatattggttttggggttttttttgttgctatttttgttattgttttcaagacagggtctcacttcgtcatccaagctgtaatgcggtggcgcagtcacggctcattgtaacctcgacctcccaggctcaagagatcctcccacctgagcctccaagtagctgggactacaggcacatgccaccatgcccggctaatttttgtattttttttctgtagaggtggggtttcgccatgttccccagactggtattgatctcctgggctcaagcagtgcactcaccttgacctcccacagtgctgggattacagacatgagccaccaagcccagcaaaatattgttaatatcttcattttatagttgagaaaactgaggcatagagaaaattttaaaatgagattttgttgtttgtatgaaaacccacttttgaattttttccaggaataaaaggaatttcttttcttcagtatttcaacatactgtcatggtagttatataagttttcttaatagcatattgacagcttcctgtgaatttgcttattatacaactaaagttactattagttccctgttcattacttaaaatttttcagttgtttcccctagcgttggggacaaaattcaaactctggccctccttgtaagatccttcctgctcgaattgttgcctacttttctagctttatttcccagttaccccgacatatatatacccggtacttgaggcccagtataccagttaagaatccttcaaatctgtcatctcattttcctccatgtttttctccctcctcctttgatcttgctttttatttcaaaagtcagcttttctttttattattatactttaagttttagggtacgtgtgcaaaacgtgcaggtttgttgcatatgtatacatgtgccatgctggtgtgctgcacccattaactcgtcatttaacattaggtatatctcctaatgctatccctctaacctccccccaccccacaacaggcctcggtgtgtgatgttccccttcctgtgtccatgtgttctcattgttcaattcccacctatgagtgagaacatgcggtgtttggttttttgtccttgtgatagtttgctgagaatgatggtttccagcttcatccatgtccctacaaaggacatgaactcatccttttttatggctgcatagtattccatggtatatatgtgccacattttcttaatccagtctatcattgttggacatttgggttggttccaagtctttgctattgtgaatagtgccgcaataaacatacgtgtgcatgtgtctttatagcagcatgatttataatcctttgggtatatacccagtgatgggatggctgggtcaaatggtatttctagttctagatccctgaggaatcgccacactgacttctacaatggttgaactagtttacagtcccaccaacagtgtacaagtgttcctatctccacatcctctccaggacctgttgtttcctgactttttaatgatcaccattctaactggtgtgagatggtatctcattgtggttttgatttgcatttctctgatggccagtgatgatgagcattttttcatgtgtcttttggctgcataaatgtcttcttttgagaagtgtctgttcatatccttcacccactttttgatggggttgtttgtttttttcttgtaactttgtttgagttcattggagattctggatattagccctttgtcagatgagtaggttgcgaaaattttctcccattnnnnnnnnnnnnnnnnnnnnnnnnnnnnnnnnnnnnnnnnnnnnnnnnnnnnnnnnnnnnnnnnnnnnnnnnnnnnnnnnnnnnnnnnnnnnnnnnnnnnnnnnnnnnnnnnnnnnnnnnnnnnnnnnnnnnnnnnnnnnnnnnnnnnnnnnnnnnnnnnnnnnnnnnnnnnnnnnnnnnnnnnnnnnnnnnnnnnnnnnnnnnnnnnnnnnnnnnnnnnnnnnnnnnnnnnnnnnnnnnnnnnnnnnnnnnnnnnnnnnnnnnnnnnnnnnnnnnnnnnnnnnnnnnnnnnnnnnnnnnnnnnnnnnnnnnnnnnnnnnnnnnnnnnnnnnnnnnnnnnnnnnnnnnnnnnnnnnnnnnnnnnnnnnnnnnnnnnnnnnnnnnnnnnnnnnnnnnnnnnnnnnnnnnnnnnnnnnnnnnnnnnnnnnnnnnnnnnnnnnnnnnnnnnnnnnnnnnnnnnnnnnnnnnnnnnnnnnnnnnnnnnnnnnnnnnnnnnnnnnnnnnnnnnnnnnnnnnnnnnnnnnnnnnnnnnnnnnnnnnnnnnnnnnnnnnnnnnnnnnnnnnnnnnnnnnnnnnnnnnnnnnnnnnnnnnnnnnnnnnnnnnnnnnnnnnnnnnnnnnnnnnnnnnnnnnnnnnnnnnnnnnnnnnnnnnnnnnnnnnnnnnnnnnnnnnnnnnnnnnnnnnnnnnnnnnnnnnnnnnnnnnnnnnnnnnnnnnnnnnnnnnnnnnnnnnnnnnnnnnnnnnnnnnnnnnnnnnnnnnnnnnnnnnnnnnnnnnnnnnnnnnnnnnnnnnnnnnnnnnnnnnnnnnnnnnnnnnnnnnnnnnnnnnnnnnnnnnnnnnnnnnnnnnnnnnnnnnnnnnnnnnnnnnnnnnnnnnnnnnnnnnnnnnnnnnnnnnnnnnnnnnnnnnnnnnnnnnnnnnnnnnnnnnnnnnnnnnnnnnnnnnnnnnnnnnnnnnnnnnnnnnnnnnnnnnnnnnnnnnnnnnnnnnnnnnnnnnnnnnnnnnnnnnnnnnnnnnnnnnnnnnnnnnnnnnnnnnnnnnnnnnnnnnnnnnnnnnnnnnnnnnnnnnnnnnnnnnnnnnnnnnnnnnnnnnnnnnnnnnnnnnnnnnnnnnnnnnnnnnnnnnnnnnnnnnnnnnnnnnnnnnnnnnnnnnnnnnnnnnnnnnnnnnnnnnnnnnnnnnnnnnnnnnnnnnnnnnnnnnnnnnnnnnnnnnnnnnnnnnnnnnnnnnnnnnnnnnnnnnnnnnnnnnnnnnnnnnnnnnnnnnnnnnnnnnnnnnnnnnnnnnnnnnnnnnnnnnnnnnnnnnnnnnnnnnnnnnnnnnnnnnnnnnnnnnnnnnnnnnnnnnnnnnnnnnnnnnnnnnnnnnnnnnnnnnnnnnnnnnnnnnnnnnnnnnnnnnnnnnnnnnnnnnnnnnnnnnnnnnnnnnnnnnnnnnnnnnnnnnnnnnnnnnnnnnnnnnnnnnnnnnnnnnnnnnnnnnnnnnnnnnnnnnnnnnnnnnnnnnnnnnnnnnnnnnnnnnnnnnnnnnnnnnnnnnnnnnnnnnnnnnnnnnnnnnnnnnnnnnnnnnnnnnnnnnnnnnnnnnnnnnnnnnnnnnnnnnnnnnnnnnnnnnnnnnnnnnnnnnnnnnnnnnnnnnnnnnnnnnnnnnnnnnnnnnnnnnnnnnnnnnnnnnnnnnnnnnnnnnnnnnnnnnnnnnnnnnnnnnnnnnnnnnnnnnnnnnnnnnnnnnnnnnnnnnnnnnnnnnnnnnnnnnnnnnnnnnnnnnnnnnnnnnnnnnnnnnnnnnnnnnnnnnnnnnnnnnnnnnnnnnnnnnnnnnnnnnnnnnnnnnnnnnnnnnnnnnnnnnnnnnnnnnnnnnnnnnnnnnnnnnnnnnnnnnnnnnnnnnnnnnnnnnnnnnnnnnnnnnnnnnnnnnnnnnnnnnnnnnnnnnnnnnnnnnnnnnnnnnnnnnnnnnnnnnnnnnnnnnnnnnnnnnnnnnnnnnnnnnnnnnnnnnnnnnnnnnnnnnnnnnnnnnnnnnnnnnnnnnnnnnnnnnnnnnnnnnnnnnnnnnnnnnnnnnnnnnnnnnnnnnnnnnnnnnnnnnnnnnnnnnnnnnnnnnnnnnnnnnnnnnnnnnnnnnnnnnnnnnnnnnnnnnnnnnnnnnnnnnnnnnnnnnnnnnnnnnnnnnnnnnnnnnnnnnnnnnnnnnnnnnnnnnnnnnnnnnnnnnnnnnnnnnnnnnnnnnnnnnnnnnnnnnnnnnnnnnnnnnnnnnnnnnnnnnnnnnnnnnnnnnnnnnnnnnnnnnnnnnnnnnnnnnnnnnnnnnnnnnnnnnnnnnnnnnnnnnnnnnnnnnnnnnnnnnnnnnnnnnnnnnnnnnnnnnnnnnnnnnnnnnnnnnnnnnnnnnnnnnnnnnnnnnnnnnnnnnnnnnnnnnnnnnnnnnnnnnnnnnnnnnnnnnnnnnnnnnnnnnnnnnnnnnnnnnnnnnnnnnnnnnnnnnnnnnnnnnnnnnnnnnnnnnnnnnnnnnnnnnnnnnnnnnnnnnnnnnnnnnnnnnnnnnnnnnnnnnnnnnnnnnnnnnnnnnnnnnnnnnnnnnnnnnnnnnnnnnnnnnnnnnnnnnnnnnnnnnnnnnnnnnnnnnnnnnnnnnnnnnnnnnnnnnnnnnnnnnnnnnnnnnnnnnnnnnnnnnnnnnnnnnnnnnnnnnnnnnnnnnnnnnnnnnnnnnnnnnnnnnnnnnnnnnnnnnnnnnnnnnnnnnnnnnnnnnnnnnnnnnnnnnnnnnnnnnnnnnnnnnnnnnnnnnnnnnnnnnnnnnnnnnnnnnnnnnnnnnnnnnnnnnnnnnnnnnnnnnnnnnnnnnnnnnnnnnnnnnnnnnnnnnnnnnnnnnnnnnnnnnnnnnnnnnnnnnnnnnnnnnnnnnnnnnnnnnnnnnnnnnnnnnnnnnnnnnnnnnnnnnnnnnnnnnnnnnnnnnnnnnnnnnnnnnnnnnnnnnnnnnnnnnnnnnnnnnnnnnnnnnnnnnnnnnnnnnnnnnnnnnnnnnnnnnnnnnnnnnnnnnnnnnnnnnnnnnnnnnnnnnnnnnnnnnnnnnnnnnnnnnnnnnnnnnnnnnnnnnnnnnnnnnnnnnnnnnnnnnnnnnnnnnnnnnnnnnnnnnnnnnnnnnnnnnnnnnnnnnnnnnnnnnnnnnnnnnnnnnnnnnnnnnnnnnnnnnnnnnnnnnnnnnnnnnnnnnnnnnnnnnnnnnnnnnnnnnnnnnnnnnnnnnnnnnnnnnnnnnnnnnnnnnnnnnnnnnnnnnnnnnnnnnnnnnnnnnnnnnnnnnnnnnnnnnnnnnnnnnnnnnnnnnnnnnnnnnnnnnnnnnnnnnnnnnnnnnnnnnnnnnnnnnnnnnnnnnnnnnnnnnnnnnnnnnnnnnnnnnnnnnnnnnnnnnnnnnnnnnnnnnnnnnnnnnnnnnnnnnnnnnnnnnnnnnnnnnnnnnnnnnnnnnnnnnnnnnnnnnnnnnnnnnnnnnnnnnnnnnnnnnnnnnnnnnnnnnnnnnnnnnnnnnnnnnnnnnnnnnnnnnnnnnnnnnnnnnnnnnnnnnnnnnnnnnnnnnnnnnnnnnnnnnnnnnnnnnnnnnnnnnnnnnnnnnnnnnnnnnnnnnnnnnnnnnnnnnnnnnnnnnnnnnnnnnnnnnnnnnnnnnnnnnnnnnnnnnnnnnnnnnnnnnnnnnnnnnnnnnnnnnnnnnnnnnnnnnnnnnnnnnnnnnnnnnnnnnnnnnnnnnnnnnnnnnnnnnnnnnnnnnnnnnnnnnnnnnnnnnnnnnnnnnnnnnnnnnnnnnnnnnnnnnnnnnnnnnnnnnnnnnnnnnnnnnnnnnnnnnnnnnnnnnnnnnnnnnnnnnnnnnnnnnnnnnnnnnnnnnnnnnnnnnnnnnnnnnnnnnnnnnnnnnnnnnnnnnnnnnnnnnnnnnnnnnnnnnnnnnnnnnnnnnnnnnnnnnnnnnnnnnnnnnnnnnnnnnnnnnnnnnnnnnnnnnnnnnnnnnnnnnnnnnnnnnnnnnnnnnnnnnnnnnnnnnnnnnnnnnnnnnnnnnnnnnnnnnnnnnnnnnnnnnnnnnnnnnnnnnnnnnnnnnnnnnnnnnnnnnnnnnnnnnnnnnnnnnnnnnnnnnnnnnnnnnnnnnnnnnnnnnnnnnnnnnnnnnnnnnnnnnnnnnnnnnnnnnnnnnnnnnnnnnnnnnnnnnnnnnnnnnnnnnnnnnnnnnnnnnnnnnnnnnnnnnnnnnnnnnnnnnnnnnnnnnnnnnnnnnnnnnnnnnnnnnnnnnnnnnnnnnnnnnnnnnnnnnnnnnnnnnnnnnnnnnnnnnnnnnnnnnnnnnnnnnnnnnnnnnnnnnnnnnnnnnnnnnnnnnnnnnnnnnnnnnnnnnnnnnnnnnnnnnnnnnnnnnnnnnnnnnnnnnnnnnnnnnnnnnnnnnnnnnnnnnnnnnnnnnnnnnnnnnnnnnnnnnnnnnnnnnnnnnnnatggggttttggtgtggatgtcctttctgtttgttagttttccttctaacagtcaggaccgttagctgcaggtctgttggagtttgctggaggtccactccagaccctgtttgcctgtatatcagcagcagaggctgcagaacagcggatattggtgaacagcaaatgttgctgcctgatcgttcctctggaagctttgtctcagaggggtacccggccgtgtgaggtgtcagtctgcccatactggggggtgcctctcagttaggctactcaggggtcagggccccacttgaggaggcagtctgtcggttctcagatctcaagctgcgtgctgggagaaccgctactctcttcaaagctgtcagacagggacatttaagtctgcggaggtttctgctgccttttgtttggctatgccctgcccccagaggtggagtctacagaggcaggcaggcctccttgagttgcagtgggctccacccagttggagcttctcggctgtgttgtttacctactcaagcctcggcagtggcaggcgcccctcccccagcctcgctgccgccttgcagtttgatctcagactgctgtgctagcaatgagcgagactctgtgggcgtaggaccctccaagccaggcacgggatacaatctcctggtgtgctgtttgctaagaccattggaaaagtgcagtattggggtgggagtgacttgattttccacgtgccatctgtcacccctttccttggctaggaaagggaattccctgaccccttgtgcttccctggtgaggtgatgcctcgtcctacttcggctcacgctcggtgtgctgcacccagtgtcctgcaccccttgtctgacaatccccagtgagatgaacgcagtacctcagttggaaatgcaggaatctttcatcttctgcatcactcacgctgggagctgtagactggaggtgttcctattcggccatattggctccacccccaaaagtcagcttaagcttgaccagttgtgatcagcattccctgttaatgccatcttacctgatttcgtgtatctctgctcttctaataccctttgttagagatctttcttataccatctcacactactgtagttaattcttttcaatttttctgtccaccatgtgcagctgaagttcattgaaggtaaggaccattatttgactttatatttccaatatcggcatactagccacagtcaaaatatgtttatttactgaaataatttgtatgtaatagtttattttttgaaatatcaattagactttaaatgttattctaattttaaaacccacatgtgaagaacagattaagtttctaatttaaatgaagtattggtttcaattttgtagatatttatggggtacttactatgtgcctgtcactattctaaacactacctggattagtgaacaaaatacaaaaatccctttcctcattgagctttatggtagaatgagaagttagatgaaaaaaataaatcttatggtgtgaaatttagacagtggaagacaacggagaaaaatgtgagaatgagaagatattggtattaggggtggaggactgttgctattttcacaatgtggtttataaaggttcattagaaggggatatttatttaaacaaacatttgaatcagatgaggcatgaagatttgggggaagaactacttactaggagaatagtacaggcaaagggcctgacataaggagcaagtctgaagtagagtctgggtggagtgagacatgggaattagaggaagtctgagaggtaaatagagccaattatgtaggacctaaaactttgacctttcccgactcagatggaaaatcattggagggttttgagcatgggagtgatcagttagatgacatttaagctgttaaaaagatttaattgaactgattcaaaaaatacttgtaagaattcatggtatttagtttggagggaaatgaggttaaaaaattaagtttcctcttattactggagttttccaccatctaaatgctatttattatttgaagactttatttttacattaatactaaatggagctatctctaaattccatggagtagaacaaaacatagaaaagtcaattttttcctcagttagttaaggaaaataggtgagaattaaacccaagccttctagtatttaacctgggattgagtttgtattttggttattataaagataagcatattgatttttgtaactatgttaaaagcttctgtgggctaagcacatctataaaattaacgccactttgttacaagtaatggaaagtttttcatttaaaagagtgtaggtctactcaaatccaacttttggtttttttcctggtacccagtaacatttacccattttgattagtttgcccaacagataacctctagggatgcctcagatgggcaataccccaaccactcttggcttaaaaacgcccactcaaaattctgttctgacatagaatgagggtgctaggtttaaatcactgtgctcagatcagtatgtagttttgacagagatggagaggaagtgataaaacctttaccattaacttaaaaatattatattttttaattatgtgaaattaccatgacattactaaatgatggaatttatcataaagctttgtgattagtttgtactttccagtttcctgagctaacttgttaatagttttttttttttttttttgcccctgaagcacaatcgtttatggctttcgttttgagcaatttacctaaatattaaaatatttttcatttttctttaaggcatttctcaattttaagcatttttaatttgaaaaaatatcttctgtaattgtatcttgtcttaatattaattgtcaggaaaatacgtacatagactgctttacctagcttgctatctagtcattagggattgcgagattctgtttaaaaacttttttctgaagtgttcagagattctttggtgtccaacttcagtacacagttaaatttaaagggatgaagtatctagaggtttttaggatattgctatatctagaattgaagaacatcatttggatcccccaagatgagctcatagtaagatctcagttaagaattaggggagtttggactcttaagtaccataatatatatgctcacttggtgttattaaaaattagtttatgtacacttagtgcccagattttggtttttaataccattctccagtgaaggggaccagggcttctcacagaaatggctgattctgtgcagcacaccagcatggcacatgtatacatatgtagctaacctgcacattgtgcacatgtaccctaaaacttaaagtataataataataaaattaaaaaaaaaaagaaatggctgattctaggacggggacaggaaatatagaagataagcctggagcaccttataatgccaataagtaaggaagtactcaaaatgcacacacacacacacacacacacacacacacacagccaaaaaaaaaaaaaaaacctacattaattggagtgtgttgaagggacagaggagccaactgaaagagttcccaatgaccaaaggtagaacaatttgagaaaaaaaaaattttgaagtattacatacttgaaatacacaagccaaagtataataacccaaagtagattataacccaaagtataaaataaatatccatgagcctatattgatttaaatgatgattaaattaataaatgtgagttaagagacaaatatgcagaagaattctaaataatttttgtagatactccaccctcaaggaggggaagtataaatctccactccataagcgtgggctgcacttagcaacttccctccaaaggaaaagtatgggagacaaaaagagtaactttacagtggagaaacctgacaaagattacctaagccaggtgattaagattaccatcaacagtcataaattacactgatagtacatacccttgatatcatgtgacatgatgaaaatggcactttacctctctggtattcctcttgataacccataaccctagtcttaccatgagaaaactatcagacagattccccttgtggagatcttacaaaatacctgaatagtaatgactcaaggctgacaagatcatcaaaaacaagcaaagtctaagaagctgtcacagccaaaaggaacctaaggagacattacaactaaatgtaatgtgtcttggatagaattctagaaacaggaaaaaaaaaaaacaggttaaaaaacaaaggcaaaggaaatctgaataaactaaggactttagtagtaatgtatcaatattggttcattaattgtaacaaaggtaccacactaatatattaataataggggaaactgtgggagggtatgtgggaactctctatcttctcaatttttctgtaaatttaaaacttttctaaaaagtatctaattttttttaaaactagtttgtgagtccatagtttttaggagccattggaattatatcaaattttaagtattggtcacaaaattgatttgtttccaattaaattatgatttatgaggaatattttctaccttttagaccttgtgtgaatgctgacttgttttaagagagggagagtgtcttgctctgttgcccaggacagagttcagtggtgcaatcacagcgtactacagctttgaactcctgggatcaagcagttctacctaagcctccctagtagctagcaatacaggcacaccccaccatgccctgctaatttttaaattttttgtacagatggggtcttgctatgttgctcaggctgatcttgagcttctggcctcaaataatcctgactcagccctgcaaagcactgggctgatttttttttttttttttgagatggagtctcactctgtctcttaggctagagtgcaatggtgcaatctcggctcactgcaacctcagcttctggttcaagcaattctcctgcctcagcctcctgagtagctgggattannnnnnnnnnnnnnnnnnnncatgcacgtcattcgatatagaagatccctggaacagatggggtcttgctattttgctcaggccgaccccggtccctggcctcaaataatcctgactgggcccttcaaagcactgggctgccccctttttttttttgagatggagtctcactctgtctcttaggctagagtgcaatggtgcaatctcggctcactgcaacctcagccttctggttcaagcaattctcctgcctcagcctcctgagtagctgggattacaggtgactgctaccacacctggctaatttttaaattttcaatagagatggggtttcaccacgttggccaaactggtctcgaacacctgacctcaggtgatctgctcacctcggcctcccaaagtgctgagattatgggtgtgagccaccacacccggccttgggctggtatttttaaactgtgcctttagctagtcctgtgtatatgtatatttctcttctgaaatggaattaaatcagtcttaatactgaaaaatactagccaaatatttgatttcttttatcccttatatatttttcagatttcattattggtttttaaaagacatttatgtgtacttttactttttctaattactaagaagaatattcaaacctttgtccatgactttaaattacaggaaactgtttcaaaaacttatcagtagtacatgatatgagtatgatttgtttttagaagtttcaaatgagtcaccttgaagtcatggagaggctaccgcttaccacatttaccattctgattaatttttcttttggcaaagtacaaatcagtaataacctactaaagcctagtggttgctgttgatatttcagtaaggtgatgttgattaatcagagtgattacttaccaagtgttacagatttactcaaattattgggttttcttctactatagtaatttcatatgcagtaataatttgcttaagacattttgcttcatatgtgcgttgaaaatatcaatgtagaacttaaaatttgtatccatgctgcaagttaatgtggttgcctctgtgaccgttgaacatagtttcataataaagcctggaaaaaaaaaagcattatttaaccttttaaacaatcaagagattgctttttaaattgtctctaaaaaggtttgattttttacgaaagagagagcacttgaatatatctttatgtaccaccgtgtctctttttgttagatttttcatctgtgggtataatataaaatattcttaaaatgaaagctttacgcttgtgtttgagactaagcaacttgcattgtgtcatgacccttctaataccacaaaccttctgtaatactactcccggagaaaaacccacatcctatgcataaccttagatttattttgaaatctctatgaaaaagaacagagagagattactaattgtttctgttacttcctttagaggtatgatacctatttgtaacccatgttgtaaatgttaatagccaggagtaaaatgttaaaatatattaagtagtggtttcctatcctaaagttaatatgtgaaaatttaataactaattataagtttcagtttgttatattagatatctggaaagaatgtaaaaaaaaaaaaaaagagagagagagagaaggcattggtacttccagtagcttatacttctaataccattggccagtacaatactagaaaataattgcaaatttaaataagccatctttttaaaaattttattcctattctgattttttccttctattttagatttctttgtattctttatgtaactgatgaaggtggatgaaaaatctaatttttttttttttttttttttttttgagacagagcctcactctgtcgcccaggctggagcacagtagcgtgatctcggcttaccgcaacctccgcctcccaggttcaagcgattctcctgcctcagcctctcaagtagctgggattacaggcacgtgccaccatgcccagctaattttttgtatttttagtagagatggagtttcaccatgttggccaggctggtctcaaaacttctgacctcaagtgatccacccacctcagcctcccagagtgctgggattacaggcatgagccaccgcgcctgaccccaaggttatttttaatatttagaaaaaatagtaactacccatcagtaggagaatggttacactatagtatatttatactctggaatattctgcgtctttcagaaagaataaagatctacaagacatactaggtgaaaaaagcaaattataagcagaatatatattcccatttgtatgtattaaaaagcatttgtgagtatatgtattgtatttatatatattaagtacatgtgcatgttaatatgtatatatgttacatgcatatgtacttaaatgcattgaaattggctgcagtgatcctgtcaaaactgttgaaatattccttcaggagatagtaaagggcttggtgcaaaagagtagaggatatgagttcactttttattctttatgaatttatatgattatcattataatattttatgtatatttaaatgacatttaaagtaactgttgctagaaaggaaataagaactagaacttccagataattatagggaaaaagtaacaaaggaaacttgggctaccaagcaaaagggccacctttttttctggccttaaagtccctgagtgttgtctggctcctgcccatttctctgacccattttaaatggcattctccttcaccagttagttctagcaactactcacctcctttttttttcttgaatcaagctctttcattcctacattaaggcttttgcttgtgctcttttttatgattgcaattctgtgctccctaatcttcccatgactgataccttctcatcatttaaatctcagcctagatataagtcactgcctgaccacctttgtaaagtaggcccctcacattgttactgtgtctcattatcatgtcttatattctttatggctcttgtcagtgcctgaaattatttttactttaaaaattaactctcacaccccatgatgtttcagtcaacgatggaccacatatatcatctgggtcccataagattatgagacagtatgtgttctgtaccttttctatgtttaaatatttagacacacaaatacttaaccactgtgttacagttgcctacagtattccatacggtaacatgctgtacatatttgtagcccaggaacagtaggctatactgtatagtctaaatgtatagtgggcactaccatttaagtttgtgtaaatacaccctacggtgttcacacaacgatgaaatcccctaacaacacatttctcagaatgtatccccattgttaagcgagtcgtgactacattagaaccttgtttgtcttatttactgctgtatgcctggtgcctggcatatcacaggtgctcaacaaatagttgctgaatgaattttaggagggagaaaatagtcatgtattgaccttctatgccataagagcaggtagcaggttttaagtactttctgtgtaaagattcctttatttaaataaatgttgcaccaaagatggcttgaaactcccagaattacctaccccaactatctaacaaaatagtaaatagtttttttttttttaaagcaaaaacttgcccaataaacctgagaggaaaaggaacataacctaatgcaataaactttaaaaagtgacagctaacaaaagaagcagacagtggtagagcagagaggcctgccagggcttggcttctaaccttgactatctatcccatttccaggctgtgtaagtcagcaaaatcccaggagaattcatttatatctcacatgtggagagaaggaaaatgagtatgtaatcttctgactgaggagtggtagaaacttctgcaaaggataaccaagtgaaagagatcagaaaagtgacacctcactcttaagtgaaggccctagggcaacacactgaatatgggaaatgatctgaatcctaaaactcaggttttgtgatatattcccccaactaggtagtacaagatatttaacaaaatctcagaagagtaagaagagcccttgtttagctaggttttttctttcactgtgcattttcctgagactatagaaaagtgagaacaagcttgagcttggaaggcaaaggaaatagatctcaaatatggtggagagatagttagtgtcatccatatcattagcgtacttggaatatgtggacaatcacctagccatgaacatggtgaaaagaaatagcacaacaatttagtttatattatttattaattattattgattattatttagcagaaagaaataccattcacaaaaccaaaaatcccaaccaagaagaaaggtaattcaaggataagaagaattacagttgcttcacactgtaaaacaacttaacattaattcagtaaaattaacagattgaaagataagatagccctttgaacaagtggctggtagtccacctacagagtgctgtgtccaggccttgtatagacatatcttgcagctgcacctggttctgcccccagacatcaaagccctgggcaaccagtgcatgaaggactaatttaggagacataagactgttggttctgacaaggctcagtgtatttgcaggaatggaaggtgtatgcagcaatgttatggcaagcaagataaagaaaacacaaaattcaactgaaaaagcatgttttggcacctccctctcagaagaaaaacctaatgactttggtgatgaacgaattggatacttacaagaggtgatacaagaaactactaaatacaataagcaacttagtaatactgagcctacaaaaccaaaattttagtctgtacaataaagcttaacaaaatatgtaaaattgagaaccccttactttaactatcattgattggtttttaaaatttattacttaagctttgaagcttttagaatgcctagtgttaattaaatattcttttatttttggttgttatgaatgcaatatatgaatcaggatcactagcagacaattgcaaaagattacaacattattggaatagcagtccttgctgggtggaatttgatttttggactaaacaggaaagaatgactctaaaatggacaaacttctagaattttgctgaaaaaaatgtttacatataaattagttttaaatgccattcttgttcaagcattagcctcatgggttttctttagcttgatcagataagtgtatagcgataatgatagatacaaaattccaacaaaaatacattgtcaatctgaaggtttcattgtttctactttaataatacatatatgattattattctaaatgttccttctccctgagtcattgtttattcacaatgaaaggttaaagagaagcttgaagattcagtattatcatttgtaaaatagatagtacaaactataatacatttctactttgtttattaatcacaagcgaccgtttaagttaaataatttaggttgggcacgggggctcacacctgtaatctcagcactttgggaggccaagacgggtggatcacttgaacccaggagtttgagagctcatatctttcttttgttttttagttaaaactattttttctagttttttcccctcaaacatttagatctttctatacaaaaggtgaactcccatttataagctaaaagtaataaatagtaatggagaaatgtatacagaggggaaaaatggctattaataactgtattagtcacagtaaaaccaaaccatcacattaaaattgctgaaaaaggaaattaattttatagtatattatttccgtgaaatatataaaataccattgatattttttataggctgtctttgatttatctttgttttattttttgtaccttggtctcccttgacttcatatgagaagggatttgtaagtaattataatctggttttccacactggcctccttccattggctctcttattaaatttgaatacactaatagtctgatcagttgatttaaatattttttggcaaaataaactcttcataggccattcagacagactagggaagggaatggtttattaataagatgaatatttaggagccatctgatcatccaatgctacagaagatacacgagaaactttgacagctttgcttcccaactttgacttgatatcactctttacagagggctcaagaaaagatacatgaataacataaaataagtactgcatttttagaaaaacaattctagcacatgtcctgctatgatctgtctcaaatcaaaatcctgattttaggtttaggctgggtatgatgactcacacctgtaataccagcactttgcgagactgaggcaggaggatcacttgagcccaagagtttgagaccaacctgggcaatgtagcaagacttggtctctatttaaaaacaaacaaacaaaaccatggtttatattggagccatttataatgatataaagagaatgggactaagagtgaaacctggcttctactccttgctttttcctggctagtcatgtggtccttgataagttacttaaccactgagtccattttcttttctttttttttttttttagacagagtcttgctctgtctcccaggctggagtgcagtggcgcgatctcagctcactggaagctctgcctcccgggttcacgccattctcctgcctcagcctcccgagtagctgggactacaggcacccgccaccacgcccagctaattttttgtattttgtttagtagatacggggtttcaccgtgttagccaggatggtctcgatctcctgacctcgtaatccgcccgcctcagcctcccaaagtgctgagattacaggcgcccggccgtccattttaaatctctagtgcttttggggccaggcccaggctatgttcagttcaagccacctatgaggatacacacaggtaaagaggccatgccaaaaaaaagaggatttagtattaatttttcattccagaatttctccacactttagttttgctaaaagaaagaaatggtgacaagaatccaccatatgggggtaatagttctagaccataatagtcatcaagctgggagaagagcatctagagaaatagcaatgtggattagtagaatgacagaaagatgaaatagcgttcacatggatccagaaagggcttttcaaactaattctttaaaagtcatggtatgcagtgcaccaccacccaaaagacttgtcagaatcttaacttaatctagcatgacagtgtttatcactagtaaatgaaatatagcaccatagcgcctttccttacagggaaaagacaaaagctaccttgcactaaacaaaagcatctgtttagagtttatggtatccaaaacaaacaaaaaaacaacaacaaagccagaaagcaaaaatgggtctaaaactttcactgagataatcccatgccgtggaatatgaagatattaaaatatctgtctagaagatgaatcacattttcttcagctacagaattttccagctgtgtgagcaatgtctcatgagcaaaatgaagcttaatgagtggatatttgatgctttccttttatggcagatcctccctttgttagaggtttctttgtgactaaccctatgctttcccagaatttaaagtcatccacctactctataaaatattttttgcaaagagacaaatgatagaacaggctgaaaggctttgttgtgtatttaaagtgatcccaacagtttgaagaaggcatcttaggaaccggctttggttcagatgaaaacttatgaagcattcactaaccagctttcctcaagacagcctgctggcccgccctactgattctaccctgcagcatcaagtctgacctggatttcctggacttctgccctgccggcaagccgtacaaaaacttccaggctgccagtccctacaagtggtgtgagctaatcccttaaatttatatttcaaatcagaccagcatattctgaagtgaaaattaagggaggaggagaaatgggcaggatcctggggaagatgagcaagcctaagtctgcctatgcctgacagaacaggagaagcttcatggggtgaaaagggaagcctttgttccttaaagggaattatattggggcccttctgctgaactggtagactaacatgtatagaggctgatttggacttggcaagagtatggcctagagttctctcaccctgttatagagataatgccattttctcaatatattctgaagtcttaagtatcttacaaggtttttttcatgtccttttgtggcactcagcacttattttcatgctttggacattactggcaatcctagccccaaagctacaaagggaattccaggtttctgacaagttttaaatgctccccatgttattccagtgaatattccagtggttatcattgaactaccaaagatgacaatgaaaatgtaagattgacaagaggctcagccattaagagttgtatcaaagggctcagattcttatttttaactgggagaatacatatcactcttgtatttgcccagcgatatagacagaactaggaaccagaatcagtgggctagcagtctgtcagatgtcttaaactacaggtaaatttgtatgtaaaaatcagccattcaaaagccacttctgtaccagacattctagtaggaatgctgctctaaaaattattcagttacttgcctaccagtattttgtatttgacctttttactctaccccgttagctatctctcttgatacattttatcaatattcttcttaataattttacttatattttagtaaaaatttaaaaataaagtcatgttaaatatggagagaattctttggacttcatagcactgaaaggtgtaaatctataggttagtctcttaataagaggcaaaaaatttaaaaattataactaccaatacttgtgtttaacataaggcaaaaaaatttaaaaattgtaactgccaatattatgtttaacttttaatgtacatatacaaaatatgtatgttaactaatatacatatgtacacatgacatacatatgtgtaggacatgtatacataatatcatacatatgactctaaggtagaatacatgtcatacatatttaccagtgtcttttagcactgttcctatgttttctgagtccttcacttcagatatttaagttttagtgcccatgtcttctatacttaatcctttgatttacccaacccttaaatatgcattgtattagtttactctgctgcctatttggtttgggaacaaggaataaaaacagtattttatttggaataatgttggaatggaaaatgtttctgtttcagcttagataatatacaatctacagacttggactcttccaaaaaattaacaatatgataaaaattctaaaatgcataaggtcaggcaaggtggctgggattacgcctgtaatcccagcactttgggaggctgaagtgagtggatcacttgaggtcaggaatttgagaccagcccggccaacatggtgaaaccctgtctctgctaaaaatacaaaaattaaccaagtgtgctggtgcatgcctgtacttccagctactcgggaggcatgagaatcgcttgaacccaggaagcagagattgcagttaaccaggatcatgccactgcactctagactatgcaacagggtgagactctgtctcagaaaaaaaaaaaaaaaaaaaaaggcacagggactcttgtagattaaaagaggctaaagggatataataacaaaatgtaaccatgaaccttggtttgattatgggcagttataaaatattttgagtcattttggggaaatctgaaaaaaaactatcttcagtgatattatggacttactgtaaatttaagtgttatgatgacatttggttacatagggcagttctttattcttagaggatgcatgatgaaatatacggtagtaaaatgtcatgacacctgcaatttacattccaatggttcaggaaaaaaatctgtgtgtgtgcacacatatgtacacatagagagcaaaagaacgaaagcccacgtagcaaaatggtaattggtgaatatagctgaagggtatatgggtgtcattgtactattatttctgctcttctatagatttgaaaagtttgaaaactaggggaaaattttgtaagttgtaaaataatggactcgatgcttttatatttgcctcctagtctggggcactttctactacttcagttatgcatctgatacactaactaggtgttaactgattaaatgctcaaaaaataaaatcacaacttgtaagcaacctgtccaattgtgtagtgtattttaaaacctatggcttgaaacatagcttttaaaatctgctgtcttcctacctaagaaagtttccaagatagggtaagttataaccaatgttaaaaacacagatttttaaaaattcatttttaggaccttataaattatgtatagatttatttataaacagtttattgtatgttttaaaatgttcccccactctgtttatagaaaaacaagcacaaacagattaaaaaacaagaatggactcttaaggataccctttacaacttctctttaaaaatgagcctgactaaatgtatggatttaaacatgcttgagatccacttcttttctttctcttacctccccagtgtttttcaatattatacactactaaaccccacctttatcccaaacacttgctcaaagcaacttgacattctattcgtctcagttttgctgcactgtaacatgttaaaaccatgctgcttagaactgtagagaaaacctttctcattttctcttcaatctcttaggttgatgcaccatcacatttaattgttcaactttttaagtggtatgttgtagtgcagctgatacaggtgaagacacctctgaataaaatgcccactttctactgtggccatatacacattgcacaaatacatattcactttttattttcctgtggattgcagcatttactgatttttcaacaaacagaatatgtgacacatcctgggcacattccatcttgtcttcatcctttctctaattacagctctccatgattgcagggataaaacaagtgaatgtgtgtgcgtaggtcgttatcaaacaatccaggtaatcaaacaccagaattactgctcttggtacaatattcttctacatactcttatgtgttatattagaaaacacagctttttactattacctatataatatataggttagaaaataagattcattgtttccatatttattgccatggtctctttacagatacaacgcttttgagtgctaaaagaattattttgctggtccccaaatgtttgggttttctttgttccttagaatgattatcttagttttcagtgatggaagtcatatatgtggaattttctcagatcctaaatattttatttagttcctcatcatatgttactaaactttaaaataatattttctgcttgagagctgggttaaccaagaaagggatttgagttcaaaattgaaccaacctctgtagacagggaactgaccagctgaaaactaacatggaaataatgtgaagtgaaactgatagcagaattgaaagaaattaatttaaggacccttgacagttttcctctatttttgtttttagatatattcactctggaaatgtggagaccatttgtaaataagtgtgtgagccttggtcatggccacatttaccatggtgggggtagttaaaggaaatatttatctctttgttatatgtaaacctatactaaaaatctgtaatgagattaaacttataaaataatatttgagatcctcaggaaataggataaaagcatttattattagcatatacatagaattttgaatttatgttttaaaaaatagttaattttcaaaggttattcaaaccagtacacttcaaatgtaggtcactggctgtgtcagaatcactctttgtgtagctttcaaaatacacttattttcaagtcctgttcctagatatttattagaattaggaggtcggggtgagtttccttaatctgtatgtttgtaaaactcctaaagtgatacttctctaattatctttggggatcactgttttaaatattttctagggtatgttgttcatattactatattcatttccttagccatttaaaaaatatttattaggtagtatgtttttgttgcagataatagaatatccagttcaaactggcttaagtaataaaggggatttattggcttatatagctaaaaagtctagaagtagaatatgcttcagaaaaagtttgatttgggctccaacttgcaactaatcatgattctgaaggctctgctgtttttgtcatttctatcctcaggaggttttcctcattatattaaaatggctaacagatgagctttatattcatatatcatagtgtccagaataagaagctgtactctataattaccagcaaaagttgtgagtcacactatttgaacaccccctgaacccatcactgtacaaaacagatatggttatcctgtttggtttagacttgaccagtcagatcctacccatggagttagggtggtatcattccaatcctatcaccactacataatgggggagagcatatagatcttgaagtaataaccacaaaacctactgtaaaatattaaagggataaactaacggagcctactctaaagtaatctttgggggacttatatcttttcatatatgtaaatgaagtgcagtgtagaccagtgtttactttttagcagatgataggaggaaagaggggatgaattgtttttcatcaataacttttcctcccagtattttactgtgaaaaatttcaaacatagaatttgaaagaattgtacagtgaacacctataaacccactatctccactctattaatattttggtatattttctttttctgttgctttatcagctgttcatcttccattgtagggatcttattttttaatgcacttcaaagttactttgttatactttacccctaaacacttaaatatgcatatcattaattgagttattgatgaccatttgattaagaacctcatacatacaaagctctcttggcttaaggccttaatatgaatcagatttgtatggacgttgtaatggtaatttctgaaagaattattcaaagatagaaccaagagtgaaatatgcatttacaccttttacacatgttatgttatgccctctttataaagtttcatttgtggtatatgacaaaacgtatgtatttaaggtctcttcagtgaaagtacggaataccaaagttgttgatatgttgggcgtctttttctttaagtttgttacttacctaattagttttacttaggaaaccagttaactggcaatctgttgttatcagctagaccaaaagaaaacctcaagaaaatgcaggtttctggtaaatttattagtgtagttgacattttcccacctgcttatcagaaacaaccatgtggacactgtttgaaaatagaaagttataaaaatacttaggaaaaaattgtaaacattagataattgaatgaactgtcccagaactaaaattaaattgatacccacttagaatatagtaattcattgctatgtcttttggtattgtaaatatagttaccctgttttaacttttaaagaggatcctaaaaggctttgaattaacaagtttaaatgagagcataaaatgtagaacataaaaatcacagacttttgataaatggttattgatacattttaatttattaaatagcatttaggacatctcactttttacttctgtttttggaatgtcagctatatttccttaaggcagactgttgaatcagaatatcccattcagagctttctaactggtctgtcacactggtgtgccactaatgtgtgacaaataagctgagatagtaattttcttgcccaggggttactgccatagcctggagctgcttaatcaccctttctctttcctcagtttatctagtgtgccttagaagttgttttctgagtgtgtgtgcatgtgtttatgtatgtgtgcctcaccacagaagcaatgacttaatggtcattatagtccaactttttgtttgtaaaagttttgcggaagaaacccaacattaagctttattaaattttatttaaatctaaataagacaactatataattggatttaataaaaaatatagttttcctttttgaaattcttttttccacagtgaatagaagttcaagaaacacttttaaagttaaaaatattccatctgttttatcataaagtttcttagcttccctgttttatccatctttattgttgtaaaatttcttagcttcactgtttttcatcaaatgctatctttcctccaaagaaatcaaagtgctattacaaagtttttagctagaccctactaagacccacctttggaaaaaacatctttggagtcacttggtagcttttgtataacaactttaatgatttttgttttaccagaattttttttcattgcaagtttctctggaggaaagaattggtgttaattattgttactagtcattctacagcctttcaaacctaaagtctttctgcattcttgaacttctctcttacaatgttagaggttaccttggcctttgtcatcttatttgccctgaaaatgttatattatcccacatattattgctatgagatgtccaaaatcctcaagaactttacctttattaaggacgagattcaaagatacttttctccaagttggattccatattgcaaacatctaacctttctatctcatccagacgggtttcttcctagtagtggatttcactttttcatctaaccaaccaagggagtgagtatgacctcataccaaaattaggccccccctgcccctcgctcccgccaaaaaaaaaaaaaaacacctaaaaggacagctgagcatatgtatccaaatgggtgattcttatcaaattagtcccccttggaagtatatcagtttactgacatgcttactcagacacttcttatgtcacatatgggatttggagaatacctcctatgagaataatgattttgtttcttttatatgaatgagcattcttcctcgtgttttttttccccttatttctacattcttcctgtttcactcactctcttattctctgtttgatgtcatccttttccactttgagggtatacagacagaactgacaatggagtaagtccagagccaaggaaaatcttagggtgagatagttatgaaacagactgaattttaatggtgagtttatctttcttatattactcttttgttcttattctgtgcctttgaaatatttctttttttttttttttttttttttttgagatggagtctccctccatcgccaggctggagtgcagtggcgcaatctcggctcactgcaacctccacctcccgggttcaagcgattctcctgcgtcaacctcctgagtagctgggattacaggcgcatgctaccacatctggctaatatttgtatttttagtggagacaggggtttcaccatattggccaggctagtgtcgaactcctgacctcaagtgatcctcccgcctcggcctcccaaagtactgggattacaggcatgagccactgtgcctggccttccttcttttttcattggaagggtaggagcagttctttgaccttctacatcccagatcacaaatcaaaagtcctgattatgatgtatttgtgattgttttgtttggtacttttggtttctttcttttttgttccttttttcttcctttcctcctctttattggattnnnnnnnnnnnnnnnnnnnnctggagtgcagtggcgcaatctcggctcactgcaacctccacctcccgggttcaagcgattctcctgcgtcaacctcctgagtagctgggattacaggcgcctgccaccatgcctggctagtttttgtatttttagtagagacagcgtttcaccatgttggccaggatggtctcgatctcttgacctcgtgatccgcctgcctcggcctcccaaagtgctgggatttcaggcatgagccaccgcgcctggcccaaaatatttcattttaaaaatgggtgattaaaaacaagaggcagacataagcgcatgtaaatggtattggacagcttgtgtgtttaatatgagtcattagcttagtgccattaatgcaagtagctgtagcatttcatcttcaattctttatatattgtagttcccatttaaattatcagaggctaaaataaatattaaagtaaatacatagacttttgtaacaaatccaagaaagaaaatttgcttgattctttgcataaatctctatctgcttaattgtttctcatgttcagaatgctataaattaaggtgaaaaatgtattgaccatctgtatgactcttaggcaaccagttcactcaatctttcatttacgtttcctcatctatgaagtaggaataataatattacctgtcacacaggatcattgtgatgattacacataagcagcttagaaaactcctggcacattataagtgccagtatttctccaccagagctccacaagagaattaaactctacagaaaatggtttgagtaaactacattgactcctgaacaacacagggattaagggtgctgatccctgcacagtggaaaatctatgtataacttttgactcccccaaaacttaactactaagagcttacttttgactagaagccttattgataacataaacagttgatgaacacatttcgtatgttacatgcatcatagactgtattcttaaaataagctagaaaaaagaaaatgttattaagaaaatcataaggaagagaaaatatattattcattaaatggaagtggatcatggcgacagtcttcattcttatcttcacattgattaggctgaggaggaggaggaagagaaggggttgtcttgctgtctcagggtggcagaggcagacgaaagtccacatatttgtggacctgcacagttcaaagccatgttatgggtcaactgtattttctcagttcttccaaggatggtacctggtagtactctagatgcacaggcatgaaatcatacacatacaatgatgctttagacgttagggcttaatcctttgggaatctcaaatgagaagggctcataagtgttgtaactgttcaatatataatagctattattattttggttgcaagtggcaaaaatctgtatttttttctttttcttttttcctttttttttttttttagataggtttttgctgtctcccaggctggagtgtagcgacatgaacacaactcactgcagcttcaacctcacagactcaagcaatccgcccgccttaccctccctggtagctgggaccacaggtgcccatcaccatgcccagctaattttttttaatgtttttgtagagacagggtcttgccatgttgcccaggctggttttgaactcgtgggctcaagcagtcttccaccttggcctctgaaagtgctaggaatacagtcataagccaccacgcccagccagaaatttatttttaaactggtttaaataataaagagactttattgttccatgtaaatgagaaaacagggaaggcctcagagattatttgattaggactctgacttagtatctctgttagttattctgttagttcagccttttctctggcagttgggtcaaactaatatttctaaccaaattttcaaaagaataatatatatttttcctaaatatgggcttgtggctaaaaagcataaggtgtattttgtatatattttagaagcctagcatatttggaatatagtaattgttaaataagacagttttggcttagataactgtatctgatattagtatgtgtaaatatgcagttatgcattgcttaactagaatatgttctgagaaattcatacttaggcaatgtcatcagtgtgtgaatcatagagtgtgcttacacaaacccagatggtatagcctactactcacctaggctatatggtatagcctatttctcctaggctacaaacctatacaacatgttactctactgaatactgtaggcggttgtaacacaatggtcagaagttgtgtatctaaacatagaagaggtacagtaaaaatatgatataaaagatttaaaatggtacacctgtatagagcatggtaccatgaatggagcttgcaggactgaaagttgctttgggtgagtcagtgagtgaatggcctacattactgcacactactgtagactttataaacacagtacagttaatctatactgtaaatttattttctttttcttcaataataaattaaccttagcttagtgtaactttttcactttataaacttaattttttttaactttttgactcttataataacacttagtttaaatatattgtatggctgtacaaaaatatcttctttctctgtgtctttattctataagctgtttttttaactctttaaacttttttattaaaaacttaggcacatggccgagcgtggtggctcacgcctgtaaatcccagcactttgggaggccaaggcgggtgggcggaacacttgaggccaggagttcaagaccagactggccaatgtggtgaaaccccgtctctaataaaaatataaaaattagctaggcatggtggtgtgcgtctgtagtcccagctactcagaaggctgaggcacgagaatcgcttgaacttgggaggtggaggttgcagtgagccgagattgtgccattgcaccccagcctggacagaggggcactctgcctcaaaaaaaaaaaaaaaaaaaaaaaagcaggcacacacattattctctgcttacatagggtcaagatcatcaggatcactgtcttctacctctacatcttgtcccactggaagatcttcaggggcaatagtattacacatggagctgtcatctcctatgaggaacaatgctttcttctggaatatctcttgtaggaccaggctgaagcttacagttaatttttcttgtataaataaaaagaatacactaaaataataaaaaatatagtatgttaaatacataaatctgtaacatagtcatttattattgtcaattattatccactgtgcataatcgtatatgccatacatttatacaactggcagcacagtagatttctttacaccagcaccaccacaaacacgagtaatgtgttttactatgacattgtacaactacaatgtcactaggcattacgaatttcttattataatcttatgggaccatcatcatgtattcattccgtcattgaccaaaacatcattatgtggaacatgactgcataagaaaaaatttttaagtctatagaagctgtagttgggcttttatatctatgcaaatattaattacactaaaccacttcagcaggccatattctagtaaaaggtttttaagacagattgtcaaaagaaagagaacaaagcaaaacaaacaaaaaacagggagtttttaggaataagtcgatgaaaggagttgaagaacaaactaagggtagttagagatgcaatttgggtagggaggacagttaacacagaacagcagtgttgttggaaagatgcttgaccctataggagtgctacccactctgtcgctagaacatttcttttttttttttttttttttgctcgggctggaatgcagtggcgcaatctcagctcactgcaacctgcgcctcccaggttcaagcgattctcctgcctcagcctcctgagtagctgggattacaggcacacactaccacacccggctaatcgtttgtatttttagtagagacagggtttcaccatgttggccaggctggtcttgaattcctgacctcaggtgatccacctgcctcggcctcctgaagtgctgggattacaggcatgagccaccgcgcctggcctgttgctagaacagttctatttggtacttcctgccaatgatgttagtatacagtatgtaggatgaagttggagggtagagttgaccagtcagaggactaagtcagaggatgttcaaggtcccttctgactgtgattttaaatatgggaggaatctccacattgacaaatgcttttcacagcaacccatttctctcaaggtaattgtaagacacgttttaaacctgcttttaaaaaaacctgtaaatacttggatattactaaggtaacttttacaggaatttcaaagctctctaaagttagaatgtgtatctttctgctccatatgtactgatattgaatgatcttcaagttgtattattgagagataatagcaaagtacagagtagcatacatagtgtctgtagtatggataaacgtgtgcatgtattcatgtgtgtttgattatatatgtgtaaaatatcgtggaaagactacaccaaaaaactgttaacaattgttgtctccatgaaaggaaactgggtgattggcaactgttaaaagtaagcccatactcttttggtatcaggagttactcagtagtttcagtagatggctccggatcagagctgcttaacattttaagcatcaacacatggcttcctaattataaataatctggagacatcaaaaacaattctagtttcactgtttaataagttctttatctaggccaggcatggtggctcacgctgtaatctcagcactttgggaggccaaggtgggcggatcacctgaggtcaggggttcgaaaccagcctggccaacatggcaaaaccctgtctctactaaaaatacaaaaattagccaggcgcagtgctgggcacctgtaatcccagctactcaggaggctgaggcaggagaattgcttgaacccaggtggcagaggttgcaatgagccgaaatcgcgccattgcactccagcctgggtgacagcgagagtccatctcaaaaaaaaaaaaaaaatctttatctgaaaaataatttatgttcgttttcaggtggtataagaaaaagtgcctctcttcaccaatctatatccctagaaaatagtcccagtgctcacctgaaacaaactcttaggatcagaagcagcttttaatcagctgtatctgggacttccagtccacatcgagagctaattaaccagaggagactcaaagttgtcctcccctttttagagtgatttggacaactttttcttttttttccccccttttctgttccccaagcaaaagcagattcccaagaatgaaagaatatgggaagcttgccatcttcttgactaagtattgaatcccttacggtatgaatagaaaatcatctgccctcaaaataactagataaattactttgaaattctagggtaattttttcatcagtagatccattcaattactgatttctgagactctttcaaaagatatattttataaattatatttattataaacaacctttattaagcatttttaaagaaataatcacacctgaggtcagaagtttgcgaccagcctgaccagcatggagaaaccctgtgtctactaaaaatacaaaattagccaggcgtggtggcacatgcctgttaatcccagctactctagaggctgaggcaagagaattgcttgaacccgggaggcagaggttgcggtgagccgagatggcaccgttgcactccatccagcctgggcaacaagaacgaaactctgtttctaaataaataaattaattaattaattaaagcatagttcattatgaattgtttgtcagaggtagtttgagaatggatttgttcagaattcaggtgattaaagggtatgtgcctatgcttttcctataccttgaactatttgagtacatgctgtgaaaaattgcctcttgtttttgctttgttgttttgtcacaaaacagaaagaagaaggaaagcttcaaggacagcttaacaagtctgattctaaccagtatattggggaactgaaagatcagatagcagagctgaatcatgaggtaagtgataaattttgatcttcacatattgctttcttccttcctctgtattgtaacaacactttattactggttataagactgacactttcatgctgaatatcttctgtgaattattggttataattaataacatttttgaaaattgtctttttagcaaggatcttctgttctaatattggggatttatttcccttaacctcattagcatgacctagaatgataaattaatattttcatggcaaatattttatttttttattgtggtgtaaaaactcttgatagtttgcatagatgtcaaagttactttaactaaactaaaattttgcttatacctatagaatagatttgtggtatttaccgttgcatgcagaaggaagtctttttactcttgtcttcttttaccgctcatgatggtattactgagattgcaaaaaaggatacttgcctaatatcagttaacagatttcttagtatctgaatgctttttaaactggtactaccttgaatctgtgagattcaactcacaaaattttcagttttaccaagtactatactgagtaatttaaagtatttagtatgttttgattagagagatatgttaatgtggctcgaggtcaattttcttatcctttattattttctgttttaatgataatatttggctaaacactaatggaataccatctttcttgttttgaattatttataaaataatgtttattcacagtgatgagatttgagagggtagtataacctttatttgtttaaaaagaagaagaaagagaaattttgaccactagatgaatttaaacctcacaggaaaaagtttagacgttaccctttcctggtattacacccttcagttaaagtctgtatgttttgggtaatacctcctggaggtagtcagtctaagagttaattctaaatgaagaagaaacaaaacataaacaaaaacagtaaatcttagatgtggctcagtttaatttgttttgaaatttggggaatcattcctgtaaatatcaattttcagccatgataacatatgagggattcaggatcttacatataatctttacctatttgtgtgtatttattataatttttttttttagacggagtctcgctctgtcggccaggctggagtgcagtggtgcaatctctgctcactgcaagctccgcctcccaggttcatgccattcttctgcctcagccttctgagtagctgggactacaggcgcccgccaccaggctggctaattttttgtatttttttagtagagacggggtttcactgtgttagccaggatggtcctgatctcctgacctcatgatctgcccgtctcagcctcccaaagtgctgggattacaggcatgagccactgcacctggcctattataatatttttaaatcgatagccatagtgtgaaagaacaagttacaattaagtgtgttgtagaaatctttattcttttgagaaccccaggaattatttatgttcaaaaggtgttctcagaggaaattgtgattaaaataaagcaacctcccatttaaaattttgatgtctcattataaggaagctttaatgttgctgaaacaagaaagttacgtatagattgactttatttctaaaactaatgtaaaagtcagtcaacaaacattaactttccctgtcatatgctttgactaaaaataatgatattctgaccaggtgtgggcgcacgcctataatcccagcactttgggaggctgaagcaggcagatcacttgaggtcaggagtttgagaccagcccatccaacatggtgaaacccctatctctactaaaaatacaaaaattagccaggcatggtggtgtgtgcctgtaacctagctactggggaggctggggcaggagaatcgcttgaacctgtgaggcggaggttgcagtgagctgagatcatgccactgcacctccaggcagcagagtgagactcagatagatagatagatagatagatagatagatagatagatagatagatagatagataggatagattagatagatagatagatagatagatagatagatagatagatagatagtctcatcaggactgccagaaaataactcacatgaagtttaactttaatgtcagttttttacgtgtggcctaagaaagcagtcttaccttatacaaacatgaaaagaaaattaatcaacagagtagaattttctactgttaaaattaaaagctagattgtgcagatttaaagagtggaaaccaaactgcatctttttgaaaagaaaggaaaaaaaacctttaaagcatttttatttattaatacccttccttgttgcagatccaattaaggaaatttgcaactgctacaaaataataaactacaattttgggagaaaaaggaaagaaaaaaactgtagaaatataatatggaagcatgaataagaccattataaaaatgcttaccataaaattatctctttcctgtaagtgggcctcagatttggctctaaggcttttagcagccaacgcaaaagaaaacctggtcacttaaacatttcagagtgtctatgtgatgaaaacagaccaattagctagaagagccacatctattcctgatactaagattaaataacaagttctccactgcttcctcacaaaggagacctagtgagttccctggttattatccttaacatttgaatggcttcataatcatgaaagttagataaagaacagaagctttaaaaaaaaaaaaaaagcttttgtaggctgggtgcaatggctcatgcctgtaatcccagcactttgggagaccgaggttggagggtcactttagcccaggagttcgagaccagcccgagcaatatagggagaccccatctctattaaaaataataataataaatgccaggcctggtggcatgcacctgtggccccagccactccagtggccgaggcaggaggatcacttgaacccaggaggtcaaggctgcagtgaaccgtgatcactgaaacgtgatcaccactgcactccagcctgggtgtcaaagcaagaccctgtctcaaaaaaaaaagaaaaaaaagttttgtatagcagcatagcatacagagacgtgtccaagtcaaaagtttacagctcaataaattatcacaaaatgatcacactcatgtaggtactacctaggtccaagaaatagacccaagagccctgttcatactctttcaacccgtactctctcccttctactcaaaggtaaccatgatctcagacttctaatacagtagtttaactttttgaactttatataaatggattcttgcagtatgttttcttttgtgtcttgcttgttttgctcaacattgtttgtgagattttactttgtcattttaaaatgtagctgtaggttgttcattttcatcactgtgtaattttcctttgcataaatataccatgatttattcatctactgtgttggtgaacatttggattatttccagttggtctgttaagaacattgctttaagtgatttatgccagtttatactgtctataagcagtgaagaaagttcttactgttctacatcctcatcaacatgtggaattgtcagtctttcttattttagccattctgtgactatgaagagatttctcattatggttttaatgtgcatttccctgattattaatgagattgagtacttttcccccagtatatagaacaatgatggcatgtagtaggtactatgtgaaaatgtttctaatgaaaaaatgatgtttgtgaaaggttttgcagatgaggtcacatataagttgcatgggaatgccaagaagctttttttttttttttttttttttttgagagggagtcttgctctgtctcccaggctggagtgcagtggtgcgatcttggctcactgcaacctctgcctcccgggttcaagcaattctcctgcctcagcctcccgagtagctagggttacaggcacacaccaccatgcctggctaatttttgcatttttttagtagagacggagtttcaccatgttgaccaggctggtctcgaactcctaaccttgtgatccgcctgcctcagcctcccaaagtgctgggattacaggcatgagccaccatgcccagccagaatcctcttaatgtgtgaaaatcagtggaaagagtattccagacagaagaaacaactagcccaaagaccctagaagaaaatgaaatggttattttgagaaacaatgctagtgtggctggagtatagtgaagggtaggaaaaatggtataagataaaattagagaggcaagtgaggtcagattgcaattggtcctctgtatccgtggattttgcatcagtggattcaaccaatcgtggatcaaaaatattttttaaagactattgcatctgtatctgtactgaacatctacaaattttattccttatcattattccctaaacaatacagtataacagtttatattgcattaacattgtattaggtattataagttatctagagatgatttgaagtatacaggaagtcaggcataggttatatgcaaatatgccatttgatataagggacttgtgcatccatgggttttagtatccttgggacatcctggacccattctcccacagatactgagggacaactgtatagtgctttgtaaaccacggtgtatagtggaaagcctttggatgtttgttgttgttgttaggggtttttttggttggtgttgtttgggtttttttgttttgttttgttttgccctttttttttttttttagagatgggggtctcactatgttgctcaggctggcctctgactcctgggctcaagtgatccttccaccttaacttcctgagtagctgggactacagggctgcaccaccatgcctgccttctttggatggtttcatacagaaaattttataatttcatttgctctgcctgctgtacagtgaactgattgtagaagagaaagagtgagaacagggaaattcatcaggagtctgttacaatggtccagataagatcaaacatggcttagaaggatggaagaagtggaaatgtaatgcggctgtgttagaagtatgtttatctcataacaaaaaacattcattggctccagagagttttggcttgagtaattgagtgaatgattggttggtgccattgaccagcatagagaaaggtaaacaagagctctatttttatgctaagatttgtagtaaggttgagattccttactgcaaatgaagatatcagataggcagtggatatgagtctgaaattctgaagagaggtcagggctaaaaataattgtagccatcactggcatgtgaatggcgttcatatataaagagaagggtgtccaggagcaagttctgaagttctcccaacctttagggtcaagagagccaggagaggaccaaaaccaccagggagataggcgggaaactggagagtatgaagacacaggagtcccagaaggaggaagggatcatttcagcgtagttatttaaatcagattttaaacttccctgatccttttgaagaataaacttattaagacagattttttggccaggcacggaggcccatgcctataatcccagcactttgggaggctgaagcaggtggatcacttgaggtcaggagtttgagactagcctggccaacatggagaaaccctgtctctacaaataaataaataaataaatacaaaaattggctgggcgtggtggtgcgcgcctgtagtcccagctacttgggaagctgaggtgggaggattgcttgagcctgggaaccagaggttgcagtgagcagagatcacaccactgcaccccagcctgggcgacacagtgagatcctgtctcaagaaaaaaaaaaaaagttttcttcggaattttttatgatttgtcagagaacaatggatgatttaagaaagaacttgaaaggagaaatgttctatctctaaatactactgactgaaacacccttcctgaagaaattagagaaacagcccttcatggtggctcatgcctgttatcccagcactctgagaggctgcggcaggcagatcatctaaggtcaggagtttgagactagcctggccaacatggctaaaccccgtctctactaaaaataaataaataaataatacaaaaattagcaggacatggtggtgcgtgcctgtaaccccagctactcaggaagctgaagcacgagaatggcttaaacctgggaggcggaggttgcagtgagccaagatctcaccactgcactccagcctgggccacagagactccgtctcaaaaaaacaaaaaaagaaaaagaaaaaagagaaatgtaagctatttcaagataaagctggaaaaaaaaaagaactattttggtatgctataaacaaaataaaactcaggtagataaaaccaacttactttgtaggaataatcattgtattggtttctactacccagaaggtcttctgtcatcctgtcttttttgttgggaaggcaatttttctaagttaaattatgtgtcacaggaagctttttttaagtaggtgattaggaatttgagtaaataaaaagaaatctaaataaagcctttactgaagtttgacttagaaaatgtttatatagacaggaatggtagtgtgggccttgtagttctggttacttgggagactgaggcaggaggcttgctctgaacccaggagtttgaggttgcagtgagctaagatcatgccactgcactccagcctaggtgacagtgagaccctaactctaaaaaaaaaataaaagggtaagaaaaaaattatgtgaatattccttaagtttttaaattctgatatctgtttatataaacctgagctatggatttaaatatatatcaaaaagtatttttaatgtcctagatattcttaatgtagtttttaatacatgtactcattttgttactaaactggaatttttgaaataaggaactttaacaatcagatgacaatacattaagtcctcacttaacattgtcagtaggttcttggaaactgagacttcagagtgaaagacatataacatgtccatgaataatgtcgttttgtttatgatgatgaggggaaaagtttggtttctttatatgtcatcttacttaaaatgacagtttccaagaacctatggaaaactttaagtgagaacttactatatgtcctcttatatttctttggatttttttttccttatgcttgtatttttctatttaaagcagtggctcacgcctgtagtcccaacactttgggaagccgaggcgggtgaatcacaaggtcaggagtttgagcccaggctggccaacatggtgaaaccccgtctctactaaaaatacaaaaattagccaggcatggtggtgtgcacctgtaatctcagctactggggaggctgtggcaggagaatcgcttgaacccaggaggcggaggttgcagtgagccaagatcacaccactgcactccaggctgggggacagaacaagacttcatctcagaaaaaaaaaaaaaagaaagaaagaaaaaagtggttaataagatctttttaaggctcattcagcattgctcttcatctagggattaaaactaaaatactaaaggtagaaaagaacttagtcatctggttctgtagttgttggcagctattttttttctttatttcatactgaatgatactgttttttggtttatttaacttcatgcttattcctttttttttttttttttttgagacgagtttcannnnnnnnnnnnnnnnnnnncagtggcacagtctcggctcactgcaacctccacctcctgggttcgagtgattctcctgcctcagcctcctaagtagctgggactacaggcacatgccgccacacctggttaattttttgtatcttagcagacacagggtttcaccgtgttgcccaggctggtcttgaactcctgagctcaggcagtctgtgcccctcggcctcccaaagtgctaggattacaagcatgagccaccacgcccggccatgcttattcttatttctatttctaccagtctttatttccttttaggtaacacaaagttccaagtatgttacctagtttacagagtggtactcaagaagagaattaacattcttactgtaaaacttcattgataacaatagtctacttctagaaacagaaataagaattaaaaacagtgctatctatttgtactggtgagtgaattttaacttttaagaaaattttaatgtttaagaagaacttcagtgtatggagttacaagctatcctgaatatttttataatagaaagtattagttttcccagtgtggcagcttcttaataaaagaaattattcccttaaatttgttctttctctaattagagcagtgtaaagtaccatgcagaagtttcaggatctcatacaaccaagtaaatagggtttttatccccctacccagaaggtcccatgtagataatgaaagattgtatttgccattctgtgaaaattgctttaagcccatcaaatgcatacactgctttttaatcttacagcctccacttatattttaaaaacccattcttttctttctttctttcttttttctggagacaaggtcttgctctgtggcccagctggagtgcagtggtgccatcaccactcactgcagcctcaacctgctgggctcaagtgatcctccgacctcagcctcctgagtagctgggactacaggtgtgcgagactgcacctgggttggttggtttgtttttgtttttgtttttgtagagacagggtctcactgtgttgccaaggctggtctggaactcctgggctcaagggatctccctgtcttggcctctgaaagtgctgggattacaggcatcaactactgtgcccagcaaaaactcattcttaatgacttctttaaatgagtagctattactccttttcctcttatatgttctgttttatcttggataagcagtttatcttatttaaagtccattttagaaattattgtgcagatttttatatttggaacaatagcgctatgtaaaatacttaaagctgagatttaagaatcatattttttaaaccagaagtgttcttaaaatttatcttgtttttcatttgataaatgaggaagctgaggtcctggttaagggacttacccaaagttacaaagctagttcgtagctgagatggaactcatgcctgggcattctaacttctgatctgctgcatcccactgccctaccatgatcctgctggcccatttaatggcgacatattaaacatagtaggagttctataagcatttgtttaattgaattaaattgaattgcttctctcagatgagaacctaacatctagttagtaaaaatctactcatagctcatattctttatttttctttctgtagcagcttctgcacttctattctatctaagactgcagaatttgtccaacttgacattcagattctgcttcaatttccatttggtgctactagcattgtagcttttaaatatttgatgactttctgaaaacaggcagttttcctagccatgtttgatgttttgagaaacacagaacttgacaaaaagtcaatccaattcatatatgcctcttatttaggaaatacaagcttattcaaagacacaaattagctttgctgttaaaagcattctgtttgaagagtttgaagtttaactggtggcaaacttccaccaatgtttccagattaatttttttaaatctccaaggcaatatgtttctccatgtatttcttgccatttaaaagaatgtataacatactgtagtctgggaagaactgtaataatcacatacaggggcagggcgtggtggctcacacctgtgattccaccactatgtgagaccgaggttggctgattgcatgagcccaggagtttgagaccaacttgggcaatatggcaaaaccctctaccaaaaaaatacaaaaattggctgggcacggtggctcacgcctgtaatcccagcactttgggaggccgaggcagagggatcacaagatcaggagttcgagaacagcctgaccaacatggagaaagcctgtctctactaaaaatacaaaaattagccgggcgtggtggtgcacgcctgtaatcccagctactggagaggctgaggcaggagaatcgcttgaacccaggaggcagaggttgcagcgagccgagattgtgccactgcactccagcctgggtggcagagtgagactccatctcaaaaaaaaaaaaaaaaaaaaaaattggccaggtgtggtggcatgcccctatagttccagctacttgggaggctgagatgggaagatctcttgagcctgggaggcagaggttgcagtgagccgagattgtaccactgcgttccagcctgggtgacagagcgaaaccctgtctcaaaataaataaataaataaataatcccacacaggataccttactttattcaagactttcagaccacttttcagttttatgttatattcataaagtataattggtgttctacccattttatgcatctgtgtatgtaattcctgcaatgggtaaaaaaaaaaattttaacttgttaatgaaaacatgtgcctctcatgatagtaatttcattaagaaactggggttaattaatgaaaacatgaacacaaagatctagtaggagaggggtaagatgctagataaggaaaccacctagaaaagaaaaaaatcgcaattaaaaatcaggtgaggaaaaatattcgaacttaaaaatgtaagaaaccaagtaaggaagtctcttaggaatattaactaaggtagggtatgcctccagagggtttgttaagagatttctaggaaaaaattcgagtgcgcagccaacttaaagaatacagaatcaacgtaaaacaagggatttgaatctgatactcagaggaccaaataaatatcttcaagggatatatcacactggtcaagaaacagaaccaggtggaattgtaaagtcagtcttggatattaagctgcattagatggaattttttctaacattgtcctagacacaatgagaagagtggccctactctcagggaacttttagtttggtggggaaaagtggaaaagttaatttgataaagactatgtggttggcactgatagagagtatttaatagttcagaaatgggagataacacagcacttaatttcatttattctaattaatggttgttatatcctctctgatgttcagagtcaagctgaattgtgaatttcttgacagcaaagattatcttattcagccttatatttcttagggtcttttgaaagtcctggcacagtagtctgaactcatgaattcagtcagttcccttggtgttcatattgtcccaaatttggccagtgggaactctttgaagctggctccagtgtcttttttttttttttttttccctacagccccattagtcctcgaacacatctgtgtttcctggcactagatggcaagtatttttaatagtactttacatcacatgggtagagctagatttcaaatgtagccaaaaaactgaaaaactgtttattaatacttatcagtaaatttctgaagagatggtcccaacaattactctttgacaattagaatggaaatataaatcatgagaaaccacttcaagggaaactggaagtcaagtgtttatgaaaaataaaggcagatggtgataagcattttttgaaggaaatggagctaactatcaagcctgtagtgacaggttttatagttttttacagcaattcttaagcagatttaattcagtaagggtgaaagagacttctatttcttttagcattcccaggaagagaccatactggtaacatactcttactaggtcgcagacatgagaaaatgaaatataaacatctaaaaccattttaattatatctaaacttttagcatgactgtagtattaagcatatttatcatttgagtgatactaataggatgtgctcaaatgtgtcattcaacttgatatatgggatgctaaaatgagctacagttttaaaatcttgtgaacttactctggttttagggcttgagtgttcatttttaaatttttttccattcattcaaagctgattattcctactcttcatctaactcccattcttttcttccattatcatgtcagtacttctaagcatatccataaaatggagaagggggaggaatagaaattcatgcagttgccgagcacagtggctcacgcctgtaatcccagcacttagggaaggcagaggcgggtggatcannnnnnnnnnnnnnnnnnnnnnnnnnnnnnnnnnnnnnnnnnnnnnnnnnnnnnnnnnnnnnnnnnnnnnnnnnnnnnnnnnnnnnnnnnnnnnnnnnnnnnnnnnnnnnnnnnnnnnnnnnnnnnnnnnnnnnnnnnnnnnnnnnnnnnnnnnnnnnnnnnnnnnnnnnnnnnnnnnnnnnnnnnnnnnnnnnnnnnnnnnnnnnnnnnnnnnnnnnnnnnnnnnnnnnnnnnnnnnnnnnnnnnnnnnnnnnnnnnnnnnnnnnnnnnnnnnnnnnnnnnnnnnnnnnnnnnnnnnnnnnnnnnnnnnnnnnnnnnnnnnnnnnnnnnnnnnnnnnnnnnnnnnnnnnnnnnnnnnnnnnnnnnnnnnnnnnnnnnnnnnnnnnnnnnnnnnnnnnnnnnnnnnnnnnnnnnnnnnnnnnnnnnnnnnnnnnnnnnnnnnnnnnnnnnnnnnnnnnnnnnnnnnnnnnnnnnnnnnnnnnnnnnnnnnnnnnnnnnnnnnnnnnnnnnnnnnnnnnnnnnnnnnnnnnnnnnnnnnnnnnnnnnnnnnnnnnnnnnnnnnnnnnnnnnnnnnnnnnnnnnnnnnnnnnnnnnnnnnnnnnnnnnnnnnnnnnnnnnnnnnnnnnnnnnnnnnnnnnnnnnnnnnnnnnnnnnnnnnnnnnnnnnnnnnnnnnnnnnnnnnnnnnnnnnnnnnnnnnnnnnnnnnnnnnnnnnnnnnnnnnnnnnnnnnnnnnnnnnnnnnnnnnnnnnnnnnnnnnnnnnnnnnnnnnnnnnnnnnnnnnnnnnnnnnnnnnnnnnnnnnnnnnnnnnnnnnnnnnnnnnnnnnnnnnnnnnnnnnnnnnnnnnnnnnnnnnnnnnnnnnnnnnnnnnnnnnnnnnnnnnnnnnnnnnnnnnnnnnnnnnnnnnnnnnnnnnnnnnnnnnnnnnnnnnnnnnnnnnnnnnnnnnnnnnnnnnnnnnnnnnnnnnnnnnnnnnnnnnnnnnnnnnnnnnnnnnnnnnnnnnnnnnnnnnnnnnnnnnnnnnnnnnnnnnnnnnnnnnnnnnnnnnnnnnnnnnnnnnnnnnnnnnnnnnnnnnnnnnnnnnnnnnnnnnnnnnnnnnnnnnnnnnnnnnnnnnnnnnnnnnnnnnnnnnnnnnnnnnnnnnnnnnnnnnnnnnnnnnnnnnnnnnnnnnnnnnnnnnnnnnnnnnnnnnnnnnnnnnnnnnnnnnnnnnnnnnnnnnnnnnnnnnnnnnnnnnnnnnnnnnnnnnnnnnnnnnnnnnnnnnnnnnnnnnnnnnnnnnnnnnnnnnnnnnnnnnnnnnnnnnnnnnnnnnnnnnnnnnnnnnnnnnnnnnnnnnnnnnnnnnnnnnnnnnnnnnnnnnnnnnnnnnnnnnnnnnnnnnnnnnnnnnnnnnnnnnnnnnnnnnnnnnnnnnnnnnnnnnnnnnnnnnnnnnnnnnnnnnnnnnnnnnnnnnnnnnnnnnnnnnnnnnnnnnnnnnnnnnnnnnnnnnnnnnnnnnnnnnnnnnnnnnnnnnnnnnnnnnnnnnnnnnnnnnnnnnnnnnnnnnnnnnnnnnnnnnnnnnnnnnnnnnnnnnnnnnnnnnnnnnnnnnnnnnnnnnnnnnnnnnnnnnnnnnnnnnnnnnnnnnnnnnnnnnnnnnnnnnnnnnnnnnnnnnnnnnnnnnnnnnnnnnnnnnnnnnnnnnnnnnnnnnnnnnnnnnnnnnnnnnnnnnnnnnnnnnnnnnnnnnnnnnnnnnnnnnnnnnnnnnnnnnnnnnnnnnnnnnnnnnnnnnnnnnnnnnnnnnnnnnnnnnnnnnnnnnnnnnnnnnnnnnnnnnnnnnnnnnnnnnnnnnnnnnnnnnnnnnnnnnnnnnnnnnnnnnnnnnnnnnnnnnnnnnnnnnnnnnnnnnnnnnnnnnnnnnnnnnnnnnnnnnnnnnnnnnnnnnnnnnnnnnnnnnnnnnnnnnnnnnnnnnnnnnnnnnnnnnnnnnnnnnnnnnnnnnnnnnnnnnnnnnnnnnnnnnnnnnnnnnnnnnnnnnnnnnnnnnnnnnnnnnnnnnnnnnnnnnnnnnnnnnnnnnnnnnnnnnnnnnnnnnnnnnnnnnnnnnnnnnnnnnnnnnnnnnnnnnnnnnnnnnnnnnnnnnnnnnnnnnnnnnnnnnnnnnnnnnnnnnnnnnnnnnnnnnnnnnnnnnnnnnnnnnnnnnnnnnnnnnnnnnnnnnnnnnnnnnnnnnnnnnnnnnnnnnnnnnnnnnnnnnnnnnnnnnnnnnnnnnnnnnnnnnnnnnnnnnnnnnnnnnnnnnnnnnnnnnnnnnnnnnnnnnnnnnnnnnnnnnnnnnnnnnnnnnnnnnnnnnnnnnnnnnnnnnnnnnnnnnnnnnnnnnnnnnnnnnnnnnnnnnnnnnnnnnnnnnnnnnnnnnnnnnnnnnnnnnnnnnnnnnnnnnnnnnnnnnnnnnnnnnnnnnnnnnnnnnnnnnnnnnnnnnnnnnnnnnnnnnnnnnnnnnnnnnnnnnnnnnnnnnnnnnnnnnnnnnnnnnnnnnnnnnnnnnnnnnnnnnnnnnnnnnnnnnnnnnnnnnnnnnnnnnnnnnnnnnnnnnnnnnnnnnnnnnnnnnnnnnnnnnnnnnnnnnnnnnnnnnnnnnnnnnnnnnnnnnnnnnnnnnnnnnnnnnnnnnnnnnnnnnnnnnnnnnnnnnnnnnnnnnnnnnnnnnnnnnnnnnnnnnnnnnnnnnnnnnnnnnnnnnnnnnnnnnnnnnnnnnnnnnnnnnnnnnnnnnnnnnnnnnnnnnnnnnnnnnnnnnnnnnnnnnnnnnnnnnnnnnnnnnnnnnnnnnnnnnnnnnnnnnnnnnnnnnnnnnnnnnnnnnnnnnnnnnnnnnnnnnnnnnnnnnnnnnnnnnnnnnnnnnnnnnnnnnnnnnnnnnnnnnnnnnnnnnnnnnnnnnnnnnnnnnnnnnnnnnnnnnnnnnnnnnnnnnnnnnnnnnnnnnnnnnnnnnnnnnnnnnnnnnnnnnnnnnnnnnnnnnnnnnnnnnnnnnnnnnnnnnnnnnnnnnnnnnnnnnnnnnnnnnnnnnnnnnnnnnnnnnnnnnnnnnnnnnnnnnnnnnnnnnnnnnnnnnnnnnnnnnnnnnnnnnnnnnnnnnnnnnnnnnnnnnnnnnnnnnnnnnnnnnnnnnnnnnnnnnnnnnnnnnnnnnnnnnnnnnnnnnnnnnnnnnnnnnnnnnnnnnnnnnnnnnnnnnnnnnnnnnnnnnnnnnnnnnnnnnnnnnnnnnnnnnnnnnnnnnnnnnnnnnnnnnnnnnnnnnnnnnnnnnnnnnnnnnnnnnnnnnnnnnnnnnnnnnnnnnnnnnnnnnnnnnnnnnnnnnnnnnnnnnnnnnnnnnnnnnnnnnnnnnnnnnnnnnnnnnnnnnnnnnnnnnnnnnnnnnnnnnnnnnnnnnnnnnnnnnnnnnnnnnnnnnnnnnnnnnnnnnnnnnnnnnnnnnnnnnnnnnnnnnnnnnnnnnnnnnnnnnnnnnnnnnnnnnnnnnnnnnnnnnnnnnnnnnnnnnnnnnnnnnnnnnnnnnnnnnnnnnnnnnnnnnnnnnnnnnnnnnnnnnnnnnnnnnnnnnnnnnnnnnnnnnnnnnnnnnnnnnnnnnnnnnnnnnnnnnnnnnnnnnnnnnnnnnnnnnnnnnnnnnnnnnnnnnnnnnnnnnnnnnnnnnnnnnnnnnnnnnnnnnnnnnnnnnnnnnnnnnnnnnnnnnnnnnnnnnnnnnnnnnnnnnnnnnnnnnnnnnnnnnnnnnnnnnnnnnnnnnnnnnnnnnnnnnnnnnnnnnnnnnnnnnnnnnnnnnnnnnnnnnnnnnnnnnnnnnnnnnnnnnnnnnnnnnnnnnnnnnnnnnnnnnnnnnnnnnnnnnnnnnnnnnnnnnnnnnnnnnnnnnnnnnnnnnnnnnnnnnnnnnnnnnnnnnnnnnnnnnnnnnnnnnnnnnnnnnnnnnnnnnnnnnnnnnnnnnnnnnnnnnnnnnnnnnnnnnnnnnnnnnnnnnnnnnnnnnnnnnnnnnnnnnnnnnnnnnnnnnnnnnnnnnnnnnnnnnnnnnnnnnnnnnnnnnnnnnnnnnnnnnnnnnnnnnnnnnnnnnnnnnnnnnnnnnnnnnnnnnnnnnnnnnnnnnnnnnnnnnnnnnnnnnnnnnnnnnnnnnnnnnnnnnnnnnnnnnnnnnnnnnnnnnnnnnnnnnnnnnnnnnnnnnnnnnnnnnnnnnnnnnnnnnnnnnnnnnnnnnnnnnnnnnnnnnnnnnnnnnnnnnnnnnnnnnnnnnnnnnnnnnnnnnnnnnnnnnnnnnnnnnnnnnnnnnnnnnnnnnnnnnnnnnnnnnnnnnnnnnnnnnnnnnnnnnnnnnnnnnnnnnnnnnnnnnnnnnnnnnnnnnnnnnnnnnnnnnnnnnnnnnnnnnnnnnnnnnnnnnnnnnnnnnnnnnnnnnnnnnnnnnnnnttaggttcgcttggtgcagactgattcaattcctggatatccttgttaactttctgtctcgttaatctgtctaatgttgacagtggggtgttaaagtctctcattattattgtgtgggagtctaagtctctttgtaggtctctaaggacttgctttatgaatctgggtgctcctgtattgggtgatacgtgtttaggatagttagctcttcttgttgaattgatccctttaccattatgtaatggccttctttgtctcttttgatctttgttggtttaaagtctgttatttatttattttttttgagatggagtcttgctctgttgcccaggctggagtgcagtggcgtgatctcggctcactgcaacctccgcctcccggattcaagcaattctcctgcctcagcctcctgagtagctggtattacatgcgtgtgccaccatgcccggttaattttatatttttagtagagacggggtttcactatgttggccaggctggtcttgaactcctgaccttgtgatccacccgcctcggtctcccaaagtgctgggattacaggtgtgaaccaccgcgcccagcctattttttttcatttggtaagtttagttttgtttccagattttgtgtgtctttgttctccgtcatactacaggtgattgagaaactatcatctttataacagtggacttcagtcaggggacctggattctagttctgtctttgtcactgattagctgggtgaccttaggatgccaattcacttcgtatatccatttaatcagtgaatatttgaacatcttttagttcacacgcatgccttaggccatgcctcagtttcttgatcacaaagcagttatactaaatggtacttaaagccccttccatcccagtgctgtgctaggtgtataaaagtcatagttccagttgatgagtttagactgataaggaaaagcagttcgtgtgggcagtactgtagtagaaccacacggcaccatggcctagaaacatgtcagaaaatctctgatcatggggctgcctaaatcgtgtattagagaaggagtagaagattgccaggaaaaggagaatagaggatatttcaagcagagaggcgtatatgcagaggcttggagtcaagtaaagatttcataaaggagactgagaaggattagtatgaaaggtaggaggaaaatgagtagagaggggcactcctgaagccaaagtgagagagagacttgcactgctcagtttgtttttagagtgtggtaccgaaaataacattcatagagattgatctaatggctgaaagtaaagcttttttaatcaaacgaggaaatctataaaatataattactttcttgattgtgtttttaaaaatcgtttgggattgtgttacttctggagtcttggtccatatgaggtgtgtttcagagccaatctgaatactgttatccacgaagctacccaatacatcatgcttcttttttaattctctatgttcttaaatataaaagtcttatttctttgactataccatgatttttgaaatatagtaattcactttaaaaaccttttttttttttttacatcaagtagtttgattttaaaatactagtttttaaaagaaacaggccaggcacaatggcctatagtctcagcactttgggaggccgagacaggaggatcacttgaggccaggagttcaagaccagcatgggcaacaaagcaagaccctgtctctcttttaaaaaattaattaataatgttatttttaaaaataaacaataacagtattgacagtttttcaaattgaaaatgtgctccactaatttactaagtgtcaattaaagaggaattgataaaagatgaatatgtagctctctcagatttacaaaaactaaaattttaaattgtggttgggagtctgtagtacatacagtaaatcatgtgcttcttatgaaccatatcttacagatgcaggtggacacgagatagtcagattttcactccccacaagctggacagctagaaatgtcatgccaatagtacgtgtcaaagacttagtgctactttgctgcctgtctgatttaagttattgtggtcagtctgaggaacctgtgatatgataagatagcattcatgaggtcatgtggtttgcaagtgcccaatcttgactgagcagcctgtgagcacctcaggaggaggaagagagggatactaactttatttgcaagcttatttgggttcagtggcagaatagtgtgggtatgtggctatatgtttatattacatattttaaaaattatttttctatcaggagttataatttctgaaaaaaagtgaatactacaaatgcattcatctccttctacttattaatatttcagtctaaaccattaaactttttattgcaaatattttcctacaacttcattttaaattttaaatgaagttgtaggaggtcatcatatgtcttttctgttgaggaaaaaactggatgtagaagatttatgttgttggtgaatattttttaaatatattaaaagttatttctacattttctaattagaaaattacttattttcaatctggtatcctttccttagaaacatacaaaatgctgtctgattttatctgtataacagctttactgagacattatttacatatgatacaatgcacccacgtaaagtttacaattcagtggtttttaatatagtcacagttatgcagctatcatcacagtcaattctagaacattatctctccaaaaagaaatcctatgctcatttagcttgtcactccctatttctctccaagccttattcccccaaccctaggcaacccactaatctactttctgtctctacacatttcccaattctggacatttaatataaatggaatcatagaacctgtggttttctgtgactggctttttcacttagtataatgttttcaaggctcattcatgtcgtagcatgtgtcagtgcttttatttatttttgtcacctaataatgttctactgtatggataaacaggcatacctggctttattatgctttgctttattgcgcctcaataaatggttgttatatcctactgtgtttttacaaagtgaaggtttgtcgcaatcctgcattgagcaagtctttcaatgccgtttttccaacagcgtgtgctcacttcatgtctctgtgtcatattttggtaattttcacaattttttaaactttttcactattataccttctggtgatctgtgatcattgatcttcgatgttgctattgtaattgtttttgggtgccacaaattgcactcatatagtcaaaagccagaaatgattaagctgtgaggcaggcatgttgaaagctgagatagcctgaaagctaggtctgttgcaccaaacagttagccaagttgtgattgcaaaggaagagttcttgaaggaaattaaagttactactccactgaaaacacaaatgataagaaagcaaagcagcctcattgctgatatggagaaagtttgagtgatctggatagaagatcaagccagccacaacattctcttaagccaaagcctaatccagtgcaaggccataactctcttcaattctttgaaggctgagagaagtgaggaagctgcagaaggaaagtgggaggctaacagaggttggttcatgaggtttaaggaaagaagccatttccgtcacataaaagtacaaggtgaagtagcaagtgctgatgtagaaactgcagcaagttatccagaagatctagctaagatcgttgatgaaggaggccaccccaaacaacagattttgaatgtagatgcaacagtcttataccggaggaagatgccctctatggctttcctagcgacagagaagtcaatatctggcttcaaagcttcaaatggctctctcgttagggcctaatgcagctgttgactttaagttgaagccaagtgcacatttaccattctgaaaaccctagggttcttaagaattatgctaaatctactttgcctgtgctctgtaaatgaaaaaacaaagcctggatgactgcacatctcattacagcatggtaaaataaatattttaagcccactgttgaaacctactgctcagaaaaaatgatttccttccaaaatattactgctcagaaacaatgcaactagtcacccaagagctctgatgcagatgtacatggtgattaatgttgttttcatgctgctaacgaaacattcattctgcagcccgtggatcaaggagtaatttcaactttcaagtcttattatttaagacatcatttcataaggctccattacataaaagtacaaggtgaagcagcaagtgctgatgtagaagcagcaggttatccagaagacatatagtgccatatatagtgattcctctaatggatttgggcaaagtaaattgaaatcctccgcaaagggttcaccattctagatgtcgttaagaacatttgtgattcatgggaggaggtcaaaatatcaacattaacaggagtttggaagaagttgattccaaccgtttgagggattgaagacttcagtggaggaagtcactgcagatgtagtggaaagagcaagaaaactagaattagtaatgtagtagagcctgaagatgtgcctgaattgctgcaatctcatgatcaaacttgaatggacgaggagttgcttcttagggatgagcaaaaaaaaaaagtggtttcttgagctagaatcttctcctggtaaagatactgtgaacattgttgagatggcaacaaaggatttagaatattccgtaaacttagttgataaagcagtggcagggtttgagagcatttactccaattttgaaagaagttctactgtgagtaaaatgctatcaaacagcatctaatgctacagagaaatacttcatgcaaggccgagtgaggaagtgcagcaaactttattgttgtcttactttaagaaattgccacaaccaccccaaccttcagtaactggccagcctgctgccaccagcatcaaggcaagaccctccaccagcaaaaagatccattacttgctgaccactcaggtgatcattagcattttttaggagtaaaccatttttaattaaggtatatacattgtttttaaacatatactgttgcacacttaacagactacagtataatgtaaagataacttttatatgcactgggaaacaaaattcatgtgactcgctttattctgatatttgtatttatccattcatcagttgatagatatttgctttattcccactttttggctatcataaataatattattttgagcattcatttacaagtttccatataaacgtatgttttcattggtctgagtatatgcgtagtaatggaattactgggtcatatggtaactgtatgtttaactatttgaggaactgccctactgttttccaaagtagcagtaccagtttacattcccaccagctgtgtatgagtgttttgatttatccacattcttactaacatttattatttattttttcgattaagtagtatctcattatggttttgatgtacattcctggtggctaatgatattgagcatgttttcatatgcttattggccatttatagcttcttcagagaaatgtcttatttagatccttcgcctatttttaaattggattgtctttttataattgagttgcaagagttctttacatattctaaatatgtgttccttatcagatacattatttctgatttttaaatatttttcttcactatattttttaaactgaaacaactatatgactagaatgattttcaggctttcttctatggaacactaaaagtgagagtggttgactttatagattaagcttctgcttttttgtttatttgttttttgtttttttgagacagagtctttctctgtcactcaggctggagtgcagtggcacgatctcagctcactgcaacctccgcctcccggggccaagcaattctcctgcctcaggctcccaagtagcttggattacaggtgcctgccaccacgcctggctaatttttgtatttttagtagaggcggggtttcaccatgttggccaggctgtactcaaactcctgacctcaggtgatcctcccgcctcggcctcccaaagtgctgggattacagacatgagccactgtgcctggccaagcttctgtttttataggaaaaggaaatgagacttacggaaaaattcattgtcttagatatgacattaaaggcacaagcagcagagaagaaaatagataagctgaacatcatcaaaatttaaaacttttgtgcttcaaagatcaccatcaagaaagtgaaaagacaacctagagaatggaagaaaaaaatcaaatcatttacctgataaggggcctgtatctagaatatataaagaactcttacaattcaattataaaaagataacccagttataaaatggataaaggatctgaatagactgttttccaaaaatgatataccagatggccagtggacatgagaaaatatgcccaacatcagtgatcaagggaatgcaaaccaaaatgacagtgagattccacttcacacttactaggatggctataataaaacagataataaaaatgttgcaaggatgtagaaaaattggaaccctcatacacagctgatagaaaggtaaaatggtacagccactttgaaaacagtatatagcaggtcctcaaatggtaaacatagagttgctatatgacctagcagttccactcctgggtatatacccaagtaacatgaaaacatgtctacactaagacatctgcataaatgttcatagcagcattattaataatatttagagagtagaaacaactcagatgtcaatcatctgatgactggataaataaaatgtggtatatccatatgatcaattatgaggcaataaaaggaatcaagtgctgacacatgccacaacatggatgataaatttttcaaaaatcagtcacagaaggccacatattgtatgatttcatttatatgtccagaatagataaatttatagagaaagaaagtagattagtggttccttggggttggaggggaagagaggggttttaagggatgacagctaagaggtgtgtggtttatttatggcatgataaaaatattctaggattggttgtggtgatggttgcacaactctatgcatatactaaaagccatcaaattgtacactctaaatgggtaaattgtatggaaggcaagttatatctcaaggtcattttaaaaattcatagtctttctcttctggacagtttcctaacctggggcccatggatggggtctattaaagtatttacaaatattttatgtataaacataggcggatctttgggagaatgggttcaagattttttttttttttttttttttttgagatggagtctagctctgtcgcccaggctgcagcacagtggcatgatctcgtctcactactagttccgcctcccgggttcccgccatcctccagcctcaccctcccaagtagctgggactacaggcgcccgccactacacccggctaattttttatatttttagtagagacggggtttcaccagtgttagccaggatggtctccatctcctgacctcgtgatccgcccgcctcggcctcccaaagtgttgggattataggcgtgagccactgcgcccggccgggttcaagattttttcagatttcttgagtgatttgacacctaaaaaaaagttttcctccatccctcaattatcttgtgggagatattgggggaattaagtaaattaatgctggaaaagcacttaaaacagagcctgggacatagtaagggctaaataagtgctcttattgttccagctataccacaaaatacttatgtagtcacagtgtgatattataaaggattagataaaatctaatgacactactccactgcctcagtgactcacccataaccttcgtgataagttctaattctttaacatggcataagattcttcatagtttagccccagctttctttcaagtttcatctctcacctctcattttgagacctatatccagccacaccaaaccacttgcagtttcctaacacataatacattctctggccttaggcttttccccatgccacctgtgcctgatttctcctccctccacctctgctcatccttacagacccaactcgaacatcatcatcttcctccttccctaagaattctcccttctagccagtgtattgcttctcctgtgggtttacttaacagtgtgccaccttggaatcagctgtttagtttttttgtcttgcccttcagatttttaactgagggcaggagccttgtcatttgtctttgcctttccagcatcacaacacttgtcacctaaacactaggtgcatatttggttaattgattgatggactgaaaaaacacatgatatagctttagagaacaagaatttcctctgaacagaatccaatccaaatagaaaagaagtacttcattttcatgagggtgttttgctaaaggtttgaatttttaaatgcttcattttgctgaaggttaaatcaaaggaaatctacatggtactttgatgtagctttaaaagttcagagtgaaacaagtgtgaagtgatttatttcctgtaattggtcataaatttacatagaacctcacatattcgtagcctcatcagcgttgaccttagagtaccttctaaataatgttaatggtttcaattttatcaagatgtgtcagctgccaggaagaagacattcagtggcagtttcattttgtttgcccacaatactgaatacatctaagtatgcactgtagaaagactaagaattctctgtaaatgactccccctctcttcttctcaggtaaaaagtgtgcagttgtaagtttcttctattccaaactttcctctcctttctaccttttttacttattaatgtgggtgcatgttttttccttctaaaaacgtcagctttaactattgcattatatacagttttacatgaaatctacaattttttcattctaaattttatattttttatgatttacttagcttaaaaccaaaaacattttcagcattatgtacctagtattatttcaataaaattcttgaattttttttagttttttttttttaagtactgtagattagaattttggctcttgtctgtgtaataaagtaatgaagaaatcatgacctccagtcgatcacttttactgatttcctgttctgattctctggaaatcattttgtttgtgtggttattactagtctaacctttgtcatgtttacaattcagtgtttaaagaagctgataattgagaataaattttgcatatcatctcccattacatttattttagattttgaaaacagaaaactattaaaggtattctataaggaatccaacaaaattactgaccaaactctgaggatggaaaaaaaagtaaagcctctagaacttagaaatacaaactatgtgattattagatctttccatgaaaagtaaaatacattgttatttaaaattgtatatattacatatcacttacagaaatgctacatttagctcaaaaagctatagctctttgttttataaagattaattatacaaactcaaatgtacgaataggagcttttataatctgatatgactcagtcttggaaacttactgcaactgttttgcagttcacttggtgtcacatgattcacttcaatggtttaaaccctgtctagtagtgatcaaagttcatttggttaggggttttttttggtgtgtggatgacttttttccactttgttgtggattgattgtctttcaaaatacccaatgcagcccttcctcttattcttttgaatctcagaaagtggtagttgtctgcacagtgcaacctccagtcacacacaggggaaattttttttaagttgaaataatatgcatgaaagcacttttaactgtaaagcattatataattataagattgtattattaattccattaccccaatgttaaaattgaaggataacttgttacgtctctttaaaaccaagtgtaaaaaaaaatcaactgtaattttttaagttaccagtgtcctatgatgtgctaaaagaaagcagacacacagcacattgtctcctctagccacacagacacttgcccaggtgatcatattttctcggcacagatttctttatcacttataaagaacctacatttaaagactacaaaactctaaaaccatgacacttctctatttcacaaaagaaatttctgtcttaatatctactggtttagccaataaagtagactaatgaaaaatttaaaaatacttatgtatccttaatgatgatgaagtcctttggggcttcagaatattcatctttacaggttatccctgctgtagaatttcaatgataacttgcgtggaatagctgtaatcttttataaatagtgtttttttagtgtttgaatttttactatcatacagtaagaaactctgctgtttcctgtcaaaacctttcatcagactatgaacatgacagtttcctgttttcttattaactatactgcatttttatgctttattctttgtaaattgtataataacttatcgctttccttttctcattactaaatgtttttgggggaccagcattgtttaatacacacagagaaattctaaaatccgatctctttattgataatgcaaagttaagattccattaaagtagatttagatgttataaaaaaagattttgttaactattaaacttgtgctgagtgtgtcagatgtcttaaatattatttaaataaattctacatgtttttactttttatactttgtctcttaatgcataacatgatgaagcagtccacatcaggtaagaacgaatatgttatttgggtcttgtattgttagtactcccatctgtctgcttattaatgttctccttcagcatttaaaagggtgggataaataattagtacctagggctttttctttttttttattatactgtaagttctggggtacgtgtgcagaacatgcaggtttgttacataggtatacacgtgccatggtggtttgctgcacccatcaacccgtcatctacattaggtatttctcctaatgctatccctcccctagccccccaccccacgacaggccccggtgtgtgatgttcctctccctgtgtccatgtgttctcattgttcaactcccacttaagaatgagaacatgcagtgtttggtttttctgtttttctgttagtttgctgataatgatggtttccaactccatccatatccctgcaaaggacatgaactcattgttttttatggctgcaaggtattccatggtgtatatgtgccacattttcttgatccagtctatcattgatgggcatttgggttggttccaagtctttgctatcatgaacagtgccgcagtaaacatgtgtgtgcatgtgtctttatagtagaatgatttataatcctttgggtatatacccagtaaggggattgctgggtcaaatggtatttctagttctagatccttgaggaatcaccacactgacttccacaatggttgaactaatttacactcccaccaacagtgtaaaagtgttcctatttctccacatcctctccagcatctgttgtttcctgactttttaatgatcaccattctatgagatggtatctcattgtggttttgatttgcatttctcaaatgaccagtgatgattagctttttttcatatgtcttgggtgcataaacttcttcttttgagaagttcatatccttcgtccactttttgatgggtttttttttcttgtaaatttgtttaagttctttgtagattctggatattagccctttgtcagatgcaaaatataaattgcaaaaattttctcccattctgtatgttgccttttcaccctgatgatagtttcttttgctgtgcagaagctctttagtttagttagatcccatttgtctattttggcttttgttgccattgcttttggtgttttaatcatgaagtctttgcccatgcctatgtcctgaatggtattgcctaggttttcttctagggtttttatggtttcaggtcttacgtttaagtctttaatccatcgtgagttaatttttgtataaagtgtaaggaagggatccagtttcagctttctggatatggctagccagttttccatttattaaatagggaatcttttcccatttctggtttaggtcaggtttgtcaaagatcacatggttgtacatgtgtggcgttatttctgaggcctctattctgttccattggtctatatatctgttttggcaccagtaccatgctgttttggttactgtagccttgtagtatagtttgaagtcaggtagcgtgataccttcagctttgttctttttgcttaggattgtcttggctatacgggctcttttttggttccatatgaaatttaaagtagttttttccaattatttgaagaaagtcaatggtagcttgatggggatagcattgaatctagaaattactttgggcagtatggccattgtcacaatattgattcttcctatccataagcatggaatgtttttccatttgtttgtgtcctctcttatttccttgagcagtggtttgtagttctccttgaagaggtccttcacatcccttgtaagttgtattccctggttttttctctcttactagtagttatgaatgggagttcactcatgatttggctctctgtttgtctgttattggtatataggaatccttgtgattttttgcacattgattttgtatcctcagacttcattgaagttgtttatcagcttagggagattttgggctgagacaatggggttttctaagtatacaatcatgtcatctgcaaacagagacaattttacttcttctctgactaattgaataccctttatttctttcttttacctgattgccctggccagaacttccaacactatgttgactaggagtggtgagagagggcatccttgtcttgtgccagttttcaaagggaatgcttccagtttttgcccactcagtatgatattggctgtgggtttgtcataaatagctcttattattttgagatacgttccatcaatacctagtttattgagaggttttagcatgaaggctgttgaatatagttgaaggccttttctgcatctattgagataaacgtggtttttgtcattggttctgcttgtgtgatggattacgtttattgatttgcatatgttnnnnnnnnnnnnnnnnnnnnttttcacagtattgattcttcctattcatgagcatgggaatgttcttccatttgtttgtgtcctcttttattttgttgagcagtggtttgtagttctccttgaagaggtccttcacatcccttgtaaattggattcctaggtgttttattctatttgtagcaattgtgaataggagtttgctcataatttggctgtctgttattggtttataagaatgcttgtgatttttgcacattgattttgtatgaagttgcttatcagcttaaggagattttgggctgagacaatggggttttacaaatatacaatcacgtcatctgcaaacaggagcaatttgacttcctcttttcctaattgaatatcctttatttctttctcttgcctgattaccctggcgagaacttccaacagtatgttgaataggagtggagagagagggcatccctgtcttgtgccggttttcaaagggaatgcttccagtttttgcccattcagtatgatattggctgtgggtttgtcataaatagctcttattattttgagatatgttccatcaatacctagtttattgagagcttttagcatgaaggactgttgaatatagttgaaggccttttctgcatctattgagataaacgtggtttttgtcattggttctgcttgtgtgatggattacgtttattgatttgcatatgtttaaccagccttgcatccctgggatgaaactgacttgatcgtggtggataagctttttgatgtgctgctggattcggtttgccagtattttattgaggattttcacaccaatgttcatcagggatattggcctgaaattttgtttttttgttgtgtctctgccaagttttgttatcaggatgatgctggcctcatgagttaaggaggattccctctttttctatcgtttggaatagtttcagaaggaatggtacaatctcctctttgtacctctggtggaattcagctgtgaatctgtctggtcctggactttttttggttggtaagctattaattgctgcctcaatttcagaacttgttactggtctattcagggattcaacttcttcctgctttagtcttgggtgtatgtgtccaggaacttatccatttattctggattttctagtttatttgcatagaggtgtttatggcattctctgatgatagtttgtatttctgtgggatcagtggtggtatcccctttatcattttttttattgcacctatttgattcttctttcttttcttctgtattagtctggctagtggtctattttgttgatcttttccaaaaaaaaaaaaaagttcctagattcattgatttttttgaagggttttttgtgtctctatctccttcagttctgctctgatcttagttatttcttgccttctgctagcttttgaatttgtttgctcctgcttctctagttcttttcaatgtgattttagggtgtcaattttagatctttcctgcttcctcttgtaggcatttaggtgctataaatttccctctacacactgctttaaatgtgtcccagagattctggtacgtgtgtctttgttctcattggattcaaagaacatctttatttctgccttcattttgttatttacccagtagtcattcaggagcaggttgttcagtttccatgtagttgtgcagttttgagtaagtttctgaatcctgagttctaattttgattgcactgtggtctgagcagactgtttgttatgatttccgttcttttgcatttgctgaggagtgttttacttccaactatgtggtcaattttagaataagtgtgatgcggtgccgagaagaacatatattctgttgatttggagtggagagttctgtagatgtctactaggtctgcttgggccagagctgattttaagccctggatatccttgttcattttctgtcttattgatctgtctaatattgacagtggggtgttaaattcccccactattattgtgtaggagtctaagtctctttgtaggtctctaaggacttgctttatgaatctgggcgctcttgtattggatgcatatatatttaggatagttagcttatcctgttgaattgatccctttaccattatgtaatgcctttctttgtctcttgatctttgttagtttaaagtctgttttatcagagactaggattgcaacccctgcttttttttgctttccatttgcttggtaaatactcctccatccgtttattttgagcctatgtgtgtctttgcacatgagatgagtctcctgaatacagcacactgatgggtcttgcctctctccagttcgccagtctgtgtcttttaattggggcatttagcccatttatgtttaaggttgatattgttatgtgtgaatttgatcctgccatgtatgatgctaggctggttattttgcccgttagttgttgcagtttcgtcatagtgtctatggtctgttacaatttggtatgtttttgcagtggctggtactggctgatcctttccatgtttagtgcttccttcaggagctcttgtaaggcaggcctggtggtgacaaaatgtctcaccatttgcttgtctgtaaaagattttatttttccttcgcttgtgaagcttagtttgtctggatgtgaaattctgggttgaaaattcttttctttaagaatgttgaatattggcccccaatctcttctggtttgtaggatttctgctgagagatccgttgttagtctgatggacttccctttgtgggtaacccaccctttctttctggctgcccttaatattttttccttcatttcaaccttggtgaatctgatgattatgtgtcttgaggttgatcttcttgaggagtatctttatggtgttctctgtatttcctgaatttgaatgttggcctaccttgctaggttggggaagctctcctggataataccctgaagagtgttttccagcttggttccattctccccatcactttcaggtacaccagtcaaacgtagatttggtctctttacatagtcccatatttcttggaggctttgtttgtttcttttcactctcttttctctaatcttgtcttcttgctttatttcattgagttgatcttcaatctctgatatcctttcttctgcttgatctgtttggctattgatacttgtgtatgcttcatgaaattctcatgctgtgtttttcagctccatgaggtaatttatgttcttctctaaactggttattctagttcgcaattcatctgaccttttttcaaggttcttagcttcattgcattgggttagaacatgctcctttagtgcagaggagtttgttattacccactttctgaagcctacttctgtcaattcgtcagactcagtctccatccagttttgttcccttgctggcaaggagttgtgatcccttggaggaaaagagatgctctggtttttggaattttcagtctttttacactggtttctccccatcttcgtggatttatctacctttggtctttgaagttggtgacctttggctggggtctctgagtggatgtcctttttgttgatgttgatactatgcctttctgcttgttagttttccttctgacaggcctctctgctgcaggtctgctggagtttgttggaggtccactctggaccctgtttgcctgggtatcaccagtggatgctgcagaacagcaaagattgctgcctgtttcttcctctgaaagctttgtcccagaggggcacctgccagatgctagccagagctctcttgtatgaggtgtctgttggcccctactgggaggtgtctcccattcaggacacacaggggtcaggaacccacttgaggaggcagtctgtcccttatcagagctcgaacgctgtgttgggagatccgctgctctcttcagagctgccaggcagggatgtataagtctgctgaggctgtgcccccaaccgccccttcccccaggtgcttcgtcccagggaggtgagggttgtatctataagtcctgactggggctgctgcgtttttttcagagatgccctgcccagagaggagggaatctggagaggcagtctggcctcagtggccttgctaccactagggctttttcaagaatcctaccgtcttttcagtatagttcatgtgcctgctcttgtcaagtcagagtactaagttctaggatataaatatgattaagaaataatccctaccatcaagggtctaacagaagagagagaatacatccacacctaccaattattccatatttttctaaacagtgcttattttaaatatttagctctaatgtcaaatcatatgatttagaaaaaatttatctacatatattcaatcatgtgttaataagtacaatatttatgaaagtatttatgaaaatacagtaagcataatttttatgaaagtatttatgaaaatatgcccattgatttattttaaatactataaacattattttaaaatggcttataaaaatgctaatagtttaacaatatcagcataatactagaaaacaaaaaaagacttttaaaatgaaagaagcaggtttcttgtttgtttttattttgttattggattagggatttggttctggctagtctttctattattgtctaaatggtcaagctaccaataaatgtggagccatatttgattgttttattaatcaccttattcttagaatacaaccaaacaaataattgaaactgagactgattatgcacagtgacaaatatttatttttatatttataccctaccttgttccccatagatttttaggcagtttgcatgaatacatatgacacaaaaataatcaaacattaggttaaaccaaaataaattactgatacttgacattcacttaaaaagtggcaatgtatgcttcagtctgacagttaaaagaatcactgctaaggtgaaatctggtaagatgagagttcatgttagcaaacagaaatgcatacagtatcaaagtaggtcacatatttggtagccaaagcaaagtaaggagcataatatgttgaagagtgtgtctagtaagacaaagccaaaccagttattcttttcctatttctaaactttgaaagaagtttctcttatgggtctatatgaagaggataagaaaatgtactaaacaggaaagtgttaggctaatggtctaacatataaagagcaattttgtaatgggcaaaaacagtgggatctaaatacataacttactggtcatctggttagatcaagaggtatgctagtggaagaatgaatggcagttgcatgtctttccaacaatcttttatagatattatttcttagacttttatttaggatacatttttattgaagtatgagatatgtacagaaaaatacacaccataagtatctagcttgatgaattatcacaaaaatgagcatgcccatttaatttcaactcaggtgaagaactggaacattaccagaatttcagaaggccctcgttactcctcccacactctctctctcatctcctcattttcctgacttctaacatgacaaacgagatccctggtttttaacattttactaatgaaatcatatagaatgagttatttggggttttggatctttcactcaatgctgagatttacccacgtagttccatgcagcagtagtctgttcatttttgctactgtatagtagtatctcatatgaatatattgtagtttgtgcatttgactattgtaaacatttgagttatttccatttggggttattatgaataaaactgttatgagccctgttataaaatttttggtgtaatgtatttatttctatttttcatatgcctaggaatggaattgctgggtgactactataattgttcaagccaggacacttttgagaatgaaaataattaaaaattactgtgtaacaacaggcataagccaggactgtcccaagcacactgaagtgtatagttattctaggtataaagtgtgtagacattcaactttagtcgatactgcgaagccattttccaaagtgcttataccaatttacactcccaccagcaatgtgcaagacttcctattccgtatcttcactaacgtgattggatagctgaaaattcagtgttgtattttctattaagaacacagaattaagttattcagtgtggtcagttaagggaccattaattggctttgacagttaactaggcagaaggtaaggtaaaagttctcttgcaaaaagtaaggagcctattacaaactctgtggaaaatggtttggcagtatttactaaatcttctttattacgcagaagttacactctagagaaatgagtacatatactgaccaaaagacatgtttaagaatgctcatagcagcattatatataatagattggagacaacccaaatggccattaacattagaaaggataaattatgatgtaatcacaaatgcaatactatgccacaccggaaaagcataagctaccatgctatatgccaacattggtgaatctcacagacaatgctgagtaacaggatacagaaacaaatgcataccatataatcctttatattaaatacaagaatagacaaaactattgtgtgatggtagatatcagaatggtggttacctttggacgagtgtagggcagtttctggaggaagacacatggaagtcttctggggagtggaaaatgcactatggctcaatctgggtgataatttcatgactatgtatgtaagtaaaattttaccaacttgtacacataaaatctgtacattttgctgtgttatatttcacttaaaaatgagcctaaatacatactttttttttcttttcttttatttctttttttcttttcttttttttttttttttgagacagtgtctcactctttcacccaggctggagtgcagtggcaccatctcagcacattgcaacctccacctcccaggttcaaccgagtctcctacctcagcctaccaagtagctaggagtacaggcgtgtgccaccttgcctggctgatttttgtgtttttagtaaagacagcgtttcaccactttggccaggctggtcttgaactcctgacttcaagtgatccacctgcctccacctcccaaactgctgggattacaagcatgagccaccgcacctggccctaaatacattcttgaaacacacatagcctcaaacttttctcaagcggttttgctattagagtgttatggccataggaaaaaaacactgaacatcttaatcagtagacttcatcttgggggacagtcagagttacagaataattaaaaattaagtggaaaattaagagagttaccgtatgccccttcaacaccttctgcctttctcctgtaattgacatcctgcagtagcttaatacataagttacaattgatgagccaacattgacacattattattaactgaagtccatagtttacattagggttcattctttgtgttgtacattctatatgttttgacaagtgtataatgacatgtatccaccattacagtagaatacaaaatggttgcactgcctaacaatcccctgtgttccacctgttcatccctcttctccttcctgaactcctgcaaccactgcttactgtctccataatttttccttttccagaatgtcatgtagtcataatcatacactatctggcctttttcagataagcttcttttgctttgcaatatgcatttaaggttcctccatgtcactccccctaacccaaacaccctcatacactaatattaaactgcttaacagctcttcattaaactgcttaacagctcttcagacctaccatgctctcttgcctccatattttaagcacatgctttctgtatctaattaggcttttcagatgtgacaccatgtgataatttctagctagaaagaataattggtggctgggcacggcggcttatgcctgtaatccctacactttgggaggctgaggtggaaggatcacctgagcccaggagttcaagaccagcctgggcaacatatcaagacctcatctctacaaataatttaaaaattagctgggcgtggtggcacatgtctgtgatctcagctgctcagaaggctgaggcagaaggctcacttgagccagggaggtggaggctgcagtgagctgtgatagtgccactgcactccaacctggatgacacagggagaccccatctcaaaaaaaacaaaaacaataataggtacagattccattgttctagaagccagaaccctactcaaagtcttggaaagggcctgcccttaagaaacatatatttcatttgtatgtttgtgtgtgtatacgtttatattaaagctcctgggtttccatagagataatcttctgagacctatctaaaactgggttggtatggatatctggtctaagaaaaaagtaaaaataaataaaatgggaacataattacagcaaaactttcctactgttctaatgagagcctgggtccgaaagaagcagtaaactgatggtataataatagtaccagcgtccgatgagctaatcatgaagaatgttttttaaaatgttggcagtggtacctaatcatttttattccacaaatttcaaacaaattattataagaatattccaaaagtcaacctaaaattactaacctagtcaacaaacatcaagatacattagtgggattttatcaaaatagcattgttggccgggtgcagtggctcacccctgtaatcccagcactttgggaggccaagacaggtgaatcacttgagtccagaagttcaaggccagcctagccaatatggcaaaaccccatctttactaaaaatacaaaaattagccaagtatggtgacgtaggcctgtaatcccagctactcgggaggctgagcaggagaattgcctgaacccaggaggcagaggttggagtcagccaagattgtgccactgcactccagcctgggcaacagattgagactctgtctcaaaaaaaaaaaaaaaaaaaaaaggcattgtcattggcactgattctgaactgactcatatcttattataacaaaatgtcccttgcaacctaccacacacgcacaccccgatgtatgtgtctctcctatggctgttgagttgtattaaaaaatacttaatctggctgggcgccagtgattcctgcgtgtaatcccagcactttgggagaccaaggcgggcagatcacttgagatcaggagttcgagagcagcctggcctacatggtgaaaccctgtctctaccaaaaatacaaaaattagctgggtgtggtggtgggcacctataatcccagctactgaggaggctgaggcaggagaattgcttgagtctgggaggcagagagcttacagtaaactgagatcacgccactgcactccagcctggaacacagtgagactttgtctaaaaaaaaaaaaaaaaaagtagttaatctatcagtgtctgtaaactaagactatattcctaagggtagacatgttattccttaaagaatatggcttgtcacctggatatgaagctgatccttggaataaaacttgaagattgacacttagtaggaagaagaaaagaaaaggttctgatgctgtttcacccaaacacacatgttctctcaagtgtagactgtgattgttgagatgtctaaaattgggtggtgcgcttcagtgatgaatcccacaaaacaccttaatgggcctagacttgaaactagatggtgaaggtgtctgtaaaccccaaagaataggtcatatcttaaaggtaatatttactagcctcatgtttattttcattttgatttttccctgctctggttggttgtgtggccacatttaggccagagtattttaaaaatatgacagtggacagtgtgaaaatggaagtgataaattaacaaggaatctttacatctaaatttatttacccttatcagattttcttaacatggtctaatatagtcaattcccaaatccagttcctttagagcagtgtatggaccaccgtcttcagaatcacctggagtacttgtttaaaatacaaactcctgggcctgtcctgctgaattcatatgttcaagagtagggctcaagaatcttttttttttttttttaaataataaacccaggcagtttcttttttttttttcttttatttttttttagatggagtcttgctctgtcacccaggctggagtgcagtggcgctatctcggctcactgcaacctccacctcccaagttcaagcaatcctgctgcctcagcctcccaagtagctgggactaagctgggactacaggcatgcaccactacacccagctaatttttatatttttagtagagtcagggtttcaccatgttggccaggctggtctcgaacttctgacctcaagtgatccaccagcctcggcctcccaaagtgctgggattacaagcgtaagtcaccatgtccagtcacccaagcagtaattatacataccaaattactggtgtagagaattagcaagtcagaagggtactcttaacatctctaatattctcacagaagtaaggactccagagcagctcgctgagttgaatagccagtgagaatgtctctctggtagttgtgactctttgctgatgttatttggaagatagcaaatctaatgaatacctaaaatacattatttttaaatgttacagaaactagaagacattcattagaaagaaacaaagattgtaacataaacttgtttttacttactttatatacccgtatttgaagataaaataatctgaaggactgaatttgattatgtaatatattttttaaaaaatatattaataaattttttaaaatgttgaaatataactatttcaacaggccaaggttgttatttaaaaatcctttttcatttgcttccaattaaatagtccatggttgccagggtgagggtgaaggggggatgttaacatggaaacaaagtgcatattttaatgattgttagagctaggtgatgacaacatgggggttcactaaattattcactgtatttttaaaaaaatattccataataaaaagttaaaggccaggcaccgtggctcacatctataattgcagcactctgggagtctgaggcaggaggattgcttgaggccaggagttcaagaccagcctagggagcatagaccttgcttctacaaaaaaagttagtcacaggctaagttcagtggctcatgactgtaatcccaccaccttggaaggctgaggtgagggaattgcttgaggctagtagttaaagaccagcctgggcaaccgagtgaaacctcatctctacagaaataaaataaatactagttagtgtggtggagtgttcctgtattcctagctactcaggagcctgaggcaggaggatcacttgagcccaggagttcaaagatgcggtgagctgtgattgtgtccttgcactctagcctaggtgacagtgggagaccctgtctcataaatgaatgaatgaatgttttaaactttttacttacctaactgacaaaaatgaaaaagcaaaaaagtgatgcaaagttgtagggaaaccagaactttacagtgttgttgagggtgtaaattctttttttttttttttttttttttttggagatggagtcttgctctgtcacccaggctggagtgctgtggcgtgatctcggctagtgaacccccgcctcccaggttcaagcagttctgcctcagcctcccgcgtagctgggattacaggtgcctgccaccacacccggctgatttttgtatttttagtagagatggggtttcaccatgttggccaggctggtctcaagctcctgaccttgtgatccttctgccttggcctcccaaagtgctgagattacaggcacgagccaccacgcctggcaaaggtataaattcttagccacctttctggaggacagcttaaacatagaaatcaaagttctgtgttcaaagttcagtgttaaaactcatgctgtattttatatttctggccatatatcttaatgaaagaataagacggctctgaagaactgtgagttcagaaactgagttcatggcagtgctattgtgaggagatggaaagctaaatttccaaacaaaatcagttaagcagatgatgacatgttgctaaatgagataccgtgcagccagtaaaagattatgacaacaagaaatgtttgatatgttattaagtgaaaaagcaggttattaaacaacatgcgtaatgaccaatccatttttgaaaagtcaataaggttagagaaattatcttgaaagctatattaaaatgttaatggattatctccggattgtgggttgtagaattgctttattttctaaggtgcctttagttgaggtatagtttatgtagtaaataataaaactaaaattatatggaagaccattttttgacaatttccagtagtttcttatgctgttaagcttttaaaatgccctcaaaaaaagaagtccatgaaatcattgataattttttgacattatttgattattatttaatgtcagtctttgaattttttttttttttttgagacggagtctcactctgtcgcccaggctagagtgaggtagcgcaatctcagctcactggcaacctccgccttctgggttcaagtgattctcctgcctcagcctaccaagtagctgggattacaggcacacaccaccacacctggctaatttttgtatttttagtagagacagggtttcaacatgttggccaggctggtctcaaactcctgacctcaagtgatccatccgccttggcctcccaaagtgctgggattacaggcgtgagccacaacacccagctgttagtctttgaattttggataaagcatatattttatttcttcttttgaactggaggttttaattttttaatgtttacatttatcatacacataaattaaaaagtcaaagaataattaaaaggcttttacaaaaagaagcagtcttggctgggcagggtggcttaatgcctgtaatctcagcactttgagaggcaaaggtgggtggactgcatgagcccaagagtttgagaccaggctgggcaacatagcgaaactccgtctgtaaagaaaatacacaaattagccaggtgtggtggcccacgcctgtagtcccagctactcggaaggctgtggtgggaggatcacctgagcctgggaggtagagtctgcagtgagctgagatcgtgccactgtactccagcctgggtgacagagtgagaccctgtctcaaaaaaaaaaaaaaagaagaagcagcaatctcatacgtgctttttgcaggccaaagaagaagaagcaatctcatacttgctttttgcaggccactattttcaaactaatttctttttttttttttttagacagggttgcactctatcacccaggctagaatgcagtggtggtgggatcatagctcactgcagccttgacctcctgtgctcaagcaatcctcccacctcagcttcctgagtagttgggactacaggtacacgccaccacgcccagctaatttttgtgttttttgtagagacagggtctcacattgttgcccaggctagtctcatactcctaggctcaagtgattcacccgccttagcctcccaaagtgctaggattacagatgtgagccaccatgcctggccgctaattcttgagtgttcagttttggcatctttacacggggaaagatttatctctttttcattctcctcacccccaccatgaacccacagactttttatcccaccatgctactaatgtaatgatttttgttagattaatttacaggatctacatcattagtttacatttacatcattagaattatataactgtcactcacaacagaacagcaagcttataggtgcttaagtatgcctcttctcaggcctctcttctggaatggagactgaagacaggcctgggaaattttatttttcacaagtttccaagatggtgttatgaggggggttggaaaataatgttcttgtttttctggctctactttaaaaaaaagctttattaagatataacttacatattataatattttaagtgtaaaattcaatgggttttgcatgtttgcatagttttgcaactatatgcacaacttttagaacaccccaaaagaaactgcatgcctatttgcgatcaccccctttcttttctctcccccagtcctaggcagccactaatctactttctgtctctataagatttgcctgttctggacatttcatataatggaatcatataatatattgtctcttgtgtctttcacttagctttcatattctttttttttttttttttttaaagacagagtcttactctgttgcccaggctggagtgcagtggcatgatctcagctcactgcaaactctgcctctggggttcaagcaattctcatacctcagcctcccaagtagctggaattacaggcgtgcaccaccacacccaactaatttttgtatttttagtagagacgacggagtttccccatgttggccaggctggtctcgaagtaccgacctcagctgatccacccacctcagcctcccaaagtgctaggattacagtcatgagccactgcacccggccaacttaatatttttgaagttcatccatatatcagcacttcattcctttttattgccaaatagcatcagttgtatggaaatagtgttttaatgtgagtgttttgctggtatacatttgcccaaaggattgccttggttttttcatttgcttggtgtgttcttttatgtgtaactctcctctagtgtcacgaaatctccttttatgtgttaatctcctctatccaaacaatttaggtgttctatgaatttcatcttcttgaagaaatctttcttctgactgctccagtctctagtctgggctggatgcctctaggtctcttgtacagctgtcatcttggggacatttttcattaccctagggatgattccctttgccatacttttgtactggacttcctctttcttccatcaaagacaaaagatgccttttttccttgatgtactttattttggtggagcatattatctactttcctgaaaaaatggtttatgggagataaatcataaaaaggttttattagattctacatctcatgattgatccaaaagacgttttaaaaacaaaacaaaaaaaggccttgtaggtcttaactcttacttagcctcacatttatttgatagtttgagtgagtatcttaaaaattgaagatgattataaaaattttaatgtagacattattttttctcagaattttgaaggcactgctctgtcttttgcagttggagagtctgatgccattctgattcttaaatcttttatacaaaacatgtttttgcttttggcaggaagctttaccttttctttctttcaagtgtcctgaaacttcactgagatgtatcatggtataggtccactttgatccactgtcctggacacttgctaggccttttcagtctcgaagctcatgactttcaggtaagagaaatttacgtctaagacctcttttttttttttttaaagcatcccttctctcttaactgagttttttcccggcttctcggagatactatcctcgaattctctggtaatatgtgactctgctcaaacttcaagactagggaactaaagactgacaggtgttttgaattcttgggtaggacttgttgaccttcattgtagggtgatcaaactgagatccttttggggggaatcccagattccctcagataggagtcttttactaaaaattacagagagtgctggtgcctctatttccttagtgagtctcaaaaatacttccatgcacattcagtgactttaaaaaacccgtgtctcattttacctggaaatataatactttttgtttttactggcatttcacaaaaaatttttgttgttgctcagtgtttgaagatactcatgtagtatgtattcaaaaattaggaaagacaatgggcctcaaaagcatatgctttgccagtcatgatggttcacacctgtaatcccagcactttgggaggccaaggcaggcagatggcttgagctcaggagttcaagaccagctgggcaacaatggcgaaaccccgtctctacaaaaaatacaaaagttttccaggtgtggtgccatgcacctgtagtcccagctacttgggaggctgaagcaggaggattgctcaagcccaggaggcagaggttgcaatgaactgagtttgcaccactgcactccagcctgggcaacagtgccagaccgtgtctcccccgaccaaaaaaaaaaaaaaaaaaaaaagcatataatattgtatgtgtaattttcaagtggatagtttttatcagattcctgattccctaataagcccaaagagatttcaaacaaaaccaaaatacaaacaaaagccattgcctagagtagtggtccctattctgagatgtgcatcagagttattcaggtctttagcccctacctctataccacaagaagaaagttgcagaaaacgttcatttaaacagttttccttgtgtcaaccatcaggtggtagaattggcccggaacagcttggttgtactactggaaagatcgcatccatttctacataccagacactagtcagatgttcatagttcagaagcacttttgtcctaaataattaagagttccatttcagctaaatcaacttttttctgtctcagccccattttatttgaaccagagggtctaccacggtgattctgagagtttagagcactgtcatcccttggtatctatgggggattggtttcggatccctatggataccaaaatccatggatgctcaagttctgtatataaaatgatgtagtgtttgcatataacctacagacatcctcccatatactttgagtcatctctagattacttttagcacctaatccaatgtaaatagttgttatactgtattgtttaggtgatgatgacaagaaaagagtcggtacatgttcagtatagaggaaaccatccttttttctcctaattattttggacccacaattgtttgaatccatgaatgtgggtcgcactgatacagagatccgaccatatttcaaaatttcctgaatgcgtgtaaaaaatgtatattctgggatttcacttttcaaaaggattcaaaatccttggatctcaagagggattctacatttttgacagagatcctcagttcttatgcagatgactagtggattacgttttgaaatatgctaatctcagtttgctactgataatacccataaggatttttttctttttttttttttggaggaaagggagagttggaaaggttgattgtctgcctgctttttgttgttgcttaaatatagtttgcccctgaaagtctggtaataaggataagcagtatatcatttagatcagatagccaggactgcactttagagggcccagctgtggctttcttctagccaaacccctttccacaggatgaggactcccagaagacatgtctacctgaagttcatgcagccccttctagaacatattctgggtagtcagtaccctggaattccttccccaaatgcccacttccagacctagtacaggactcctccctcatcagatccagtgtgcacacacctaagtctaagggacagataaccaagggatagcttcagttttaccacatagtcgcttaccttcaccattttttctctccaccaataaattcctttacgtttgctattccatattaacagctctcaatgagattcctttgatgttgaggaaatgacccttcaacctatagttaattttctataattacatctgatgatgaggctgcagtgttttaattgcaataaattttgttagagcaaaggaaagctgcagctttccaaacagttgggaagttgtggttcttctgccatactcctcctttataacagccaggaagaaggaagacacatgttccatatgatttcttcaaaaaggtctgggggaaaaagagaaaggaagagattaactgacttaatttaacacttggagctataaattgtgtgttgcaatattgcgataggatgttgcatcagaacgtggcagttgtaacaatgcagtgggtatcataaccttgaggaggcctttgtggtgctatatgcccttttcctaaagattcaactccaagtatagatccctctgttctgccaaggagaatggtattatttaaattacgttgtacctcactataaatttgtccacttggtctagggcacaggaatatagttgaaggtctgcttgggccagacatcattgttctgagtccctgcatccctgctgattcttgttgtcatatacaagcagggaagtgctgaggtttcttcacttcttcctggaagtctttcaggaaagctgggaggtattatggtgaggctgtaatgtctttattctcaggaccgttagttttgaaagtgtatgtaatatttcctgaatatttcacattgcctttatctaaagaattgaaagattgtgactaggagtttgtccctgagaaacaaggatgagggtaggagacgtggagcatattttagcaagattcttaatagtcagagtagatatttggtagctaattcttgtttttggttttggttttttactcttccactttattgtaggagaaaattcatggtgcatgagagaaatgaaataagtgacagaatgtcaaaatcaaactttaaaacataaactcttgagggcagagctgatgacttaattgtatgtgagtagaactggtactgtcatggttgtggatttgggagtttgaggaaacttgagcaaagaagtggcagatgatgaaaataaatcagttttaattctgataaaactggttttggaaaatgtggtttagatttaaatgtggcacaattttttcaatactaaactctagaattagtcagacttgcccacccagtaacaggtagcttttgacctccttaagcctccttatgtgagggtcttgtactataaaactccagggattgaggactagagcctcattctaaaagatgggaagaaagggaaaagagatgagtgaggcataccattcctctctcctcctccccactaagagaagcctcaccttctccccagggggagttggggagagaaggcagaaatgttataccggactggcactccccccatgcagaaggaaacctcatgagtgggaagcagcattcctctcccacagtaagtgacggtgatatgctggcctttgggctattataacaggatggagactcttagcaaagttttaatgatttataaatcattttcatcatttacagaactatggagacattctctcaagatagtgtgtgtgatagtatggtttttaagttcataccttctagaaataccagcaaaatatttacagataaactgataggatgtctggggtttacctcaaaattatccaggaacaagaggtgtgtaatgtaaaaagattgtccatgatgggtgttacttgttgaaattaggtgatgggtacatggagtccattatattatctctagtataatgaagatttagtttgaatctaaactttgctactagctatatatgtccttagcaagttactcttcctgagtctccatttcctaatctgtagaatgagaaaagtaaatactaaaatctatcacataggacggttgttattattcaattaaagtaagttacaggccaggtgtggtggctcacacctgtaatcccaacactttgggagactgaggcaggcagattgcttgagcccaggagtttgagaccagcctgggcaacatggtgaaaccccgtgtctacaaaaaatacaaaaaaattagccaggcatggtgacacacgcctgtagtcccagctactcaggaggctgaggtgggagaatcgcttaagcctgggaggcggaggttgcagtgagccgagatcgcaccactgcactccagcctgggtgacaaagtgagactgagacctgtctcaaaaaaaataaaataaaaataattatgagcccattatatataacacatagaaggcactcaaaaattagtaactatgattatacctgtaaatagaaaaataataaggcatcttcttccttaaacatggaatgtttgctttttggcgtgtgtgtgtttcccccatttgactgtattaacttggattttgttttaacagctcaggtgcctaaaaggccagaggggcttctcaggccaacctccttttgatggaatccacattgtcaaccatttaataggagatgatgaatcattccattcctccgatgaagattttatagataattccttacaggaaactggtgttggttttcctttgcacggaaaatctggttcgatgtctttggaccccgcagtggcagatggtagtgagagcgaaacagaagacagtgtgctggagaccagagagagcaaccaagtggttcaaaaggagcggcccccgagaagaagagagtcgtattcaaccactgtctgaccatcactgtgacctagactatggatttatttaagggatcagttatcatatgattagggctttttggaaataatttgtttcatatgtacatatatatatatatatatatatatatatatatatatatatatatatatatatatattttacagtcttatctgcctttttatctttgccaaatctttaccactgatttaccattgccataaagtagactggtatatggttaatgtgtaaaacaaggttctaacagtattactgaatattaatgtttcttgtttagaaaatgcaactatatctatatgtgggaaccattctgaagttcaaaactatggaaaattgaattttcttcagacaaaactgctcttgtgcaatattttatgctcagtgagcaaattgtgtatttatgtttatcaatttgttctcaaggtggctgtctacagacatttgaccaagacatacatctgatttaccttgtgtttttttttttattgttgtttttttttttaagacagagattcagtctgtcacccaggctggagtgctgtggtgtgatcttagctcactgcaacctccgcctcccaggttcaagcaattttcctgcctcagcctcccgagtacctgggactatatgtgcgcaccaccacgcctggctaattttttgtatttttagtagagatggggtttcaccatgttggctgggctggtctcgaactcctaacctcaagtgatccacccgcctcagcctcccaaagtgctgggattacaggtgtgagccactgcacccagcctaccttgtctgtttgtgtctgggaggttttttttttctatttttattttttcatgaaaattattggtgggccactgaaagtccccacacacaaagcctttattctatataattttataaacacaaattcatgattatctgttttgagagttttaagttttgttttaatgtttaacttttatgtgcatatgatgcttccatgtgttggttactagagtagtaggttaactacagacatactgttttgtttgtacatatttataaatctgtaccacctaacattgaacatcattttatatgaagaacatacatgttgcaaaatgactgctttcagcatctaacaggacttctgtaaataataggttaaaagttaaaaataaaacactaatgttttaagagctttagtattttgcttagcattcaatactagcagattcataactgatgcctgttcaaaaacactgttggtggaatcttttatttcatgtgtatgtaactactaaatttttcatgactgaagaggttatagcacatattagttagtgctaatattctactgaatataatttaagcaatgggctaaggtccaagaaacatagcaattatatctacaaataatctattaacatgatcttcagaatctctagtttttgttctatagataaagccataagaatcctttcctaccagtttttcctatatcatttagatattatttcctagaaaacaggatgcctgtcactgataagttagagaaaacacccaaattatacttgcactatggaaagacgacatgaatatgttgactgggtactttctactctcatttttgttagcctatgaaaaaaaaaacattttgttaacctatggaaaaagccttggaagagaaaagtagaattcagtatgtatggaggcacagttttgcacagtatgttgcatgcggcaaaaaaaaaaatatgaaatagagtagaagagataaaagtagttttctgtcaaaaactaggagttaagccttcaggtacgttgtggactaggctttccagcaaggtttttgtagctatttgcttgcctgagaaatgaaattgaaaacatacccctgcgtgtctgtccttaacaccaggctaaattctggtggttaaataacttacctgtggttacaagctagtaagtagcagagccaagattttttttaatatagagacaggtgtctcactgtgttgtccaggctggtcttgaactcctggcctcaagtggtcctcctgcctcagcctcccaaagtgtggggattacaggtgcgagctactgctcccagcaagagccaagattttaacctagatctccctaacaccaaagcttttgaaagggttcagctgaagaatttctcaattctctgttttgttttgtttttatttttgttttttgagatgaagtctcactgcactcaggctggagtgcagtggtacgatcttggctcactgcaacctccacctcccgggttcaagcgattctcctgcctcagctcccaagtagctgggactacaggtgcacgccaccacaactggctaatttttgtatttttagtagagatggggtttcgctatgttggccaggctgatctcaaacttctgacctcaggtgatccacccactttgacctcccaaagtgctgggattactagacgtaagccaccacacctggcaattccctgcttttttgacaacataatttaaatgaatttgatttaaatgtttcctgaatatatatacagatagatagatgagtatcaacacttacaagctctacacagtctgtgagtgtagatactacttacttgtaggattgtcttgtgctttggggatttttgttcggagttctatactatcagcccagaaagctatcaatgtccaagtgaagtgagatgatgcatggccacattattgctttgaccctcacatcaagaaatctgaatgatctggaccaggggtcagcaaagtgcagcctacaagctattgcagtcagctgccagtttttacttttttaaatagttgggaaaaaaattccaaagactgatattttgtgtcacatgaaaattatatgaaattcaaattgcagtgtccataagtaaagttttattggggcacacccatgctcacccttttaaatattgtgtatggccgctttgtgctacagtagcagagttgagtcattgcaagggagaccatatggcccaggtagcctaaaatatttatctgatcctttacagaaaaagtttgctaacccttgataacagatactctaaaatgcaggtttttcttcttcaatttagctcagtggtaggtcaaattgtttgcttttgctattaagcttatgatttggaaacgtaaaatttcatggtggatcttataatcagaactattcaaaagggaaaacatgccagccattttatatgatgaagtctcttattccatagaaaactgtagaaaggtatctgtatctttggagaaggagaaagaaaggaaagaactccagaatcccatcactgttctttaaagcatgcatcacagacctttaagagtatgctttattgagtaaaggttatagtttgactttaagataagaaattttctagaatcatgtttgaattctaaacgttgatattcttaagtaccatttctgattaggaattaggtgttaaaagaatcatggtaaggaaaccttaatccgttgaaactcttgtaatttggacaacaaaaaactagaaataacactcttttctttgaagatctgattcaaatacaccttagaagagtttaaaatctcccaggcctttaggatgcaataggatattatgccttggtttgactccttttcattcaaattaatgtaagtatgttgttcaagactttgaagcattgaacaatgttctcgatgaattttatttaattactgacattttgtgatatttgaatgttattaagttaaacacttagagttgagtatattcaggggagaaaagtgaatgaaatgactcataataagaaagcttgctcccttgggacagttaccttcctggtgtcattgccatcctgggttgacaagctgagagtagaggatacaagtgatgtgaataaaatggaaattgcattgagttaatgaaacagacacttttagatcaagaaaacacttcaacagcctttttagaaattggcacactcctatagtcccacctactcaagaggctgaggcaggaggatcactagagtacaggagtttggggctgtagtgtgtaatgatcacacctgtgaaagaataaccactgcactccaacctgggcaacatggcaagaccctgtctctttaaaaaaaaaaaaaatcctgggaaaagaagtcaaagatgtaattttacacaatttctgcccccaccgtcttttttgtttgtttgtttgtttgtttgttttttggctagatactaggtattcagtgtttgctgagatgacaggtttctactaatcagccagttatttgggaaggagaaaaactttttctcaattctgaacatgatgcagcttgttaactctccagatagtgcctttgattgaaaataaggtctacacctttttaagtatattatttctgacatcgtaagaaataatttagttccttattctcatttatcttttatataatgtactgtaatattcaggtttaaagtaaaataagtatatgaattatattttggtaaaactgtttcatgaccagcttgattaatgtatattaacataccagacattgacagcgaacatttcatgaaatcagttatttacttaccaaaacaatgagttttagcttgaaagttactgctgctctattattaacaaaactaagttttaaaaattaattttaattctactgaagtttaatttctggttaaaggtatagtggatgctatttatgatccaagtttttacatcacatccattgatctgcctatcccttctttttactccaaagaggagatgatagaataatacattcagtatactaccaagaagcaaagttataatgtgtttcattttgctattggaattttttattgtaacattgtatgataacctgaaatgtttacttgtgccttttctttaaacaattaaagttttccattttataagaatttctgtttccttcagcttttcaactttaaaagaggaggggcatcaaaacactgttaacaaatgggtggggcgcggtgggctcacacctgtaatcccagtactttcggaggccgaggcgggcagatcacttgagctcagaagttcgagaacagcctggccaacatggtgaaaccctctctctactaaaaatacaaaaattagccaggtgtggtggtgcatgcctgtagtcacagctactcaggaggctgacacagaagaatcgcttgaacccgggaggtggaggttgcagtgagccgtgatcacactactgcactccagcctgggcgacagagcaagactccatgtcaaaaaaaaaaaaaaaaaaaggttgcctatgtgacgttatagcagtgtcgaagtcagaacatccacctgtcggaatcctgagatactcaannnnnnnnnnnnnnnnnnnnnnnnnnnnnnnnnnnnnnnnnnnnnnnnnnnnnnnnnnnnnnnnnnnnnnnnnnnnnnnnnnnnnnnnnnnnnnnnnnnnnnnnnnnnnnnnnnnnnnnnnnnnnnnnnnnnnnnnnnnnnnnnnnnnnnnnnnnnnnnnnnnnnnnnnnnnnnnnnnnnnnnnnnnnnnnnnnnnnnnnnnnnnnnnnnnnnnnnnnnnnnnnnnnnnnnnnnnnnnnnnnnnnnnnnnnnnnnnnnnnnnnnnnnnnnnnnnnnnnnnnnnnnnnnnnnnnnnnnnnnnnnnnnnnnnnnnnnnattacaagcatgcgccaccacacccggcaattttgtatttttagtagagacggggtttctccatgttggtcaggctggtctcgaactcccgacctcaggtgatccgcccgcctcagcctcccaaagtgctgggatttcagtcgtgagccaccacgcccggcccagtaaatattttttaatttaatgaaagaccatgctttagtgaaagatgtctaggtttgtttccttcaggaacatggtaattttttggaaatctcaatagcagtattttcatctcacattgtactttaggttattaattagcaactaattcaataaatacattcaattatatataatttgagtacacatatagctactatcataaaaggaaagttataccttctgcatctttatcacaatgttaatgtcatttagttcacaagcaagagcttactatatattctgctttattcccaacaggaattaaggtacgttttgtagatacctgaaatatgacaagctatataatccagggagtctccactttgtcactgacatttggaagtagccaaataattctgttttgggaggccctgtacattgtaggatgttttgcagcatccctggcctctacccagtagatgccagtaacaccccctcctttagttgggacaacccaaaatgtctccaaacatgggcaaatgtcaccagcaggaaggacagagaatgaaaatcactgctagttgagaaccactgctataaatttagaattgggtcataaaaagagccactcgggccaaacataagaatatatacatcatttggggttttgtaaatggcagagcagctccctcactgcaatctattgaaagtcagcccttgacacaagggtttgtaaaatacaaaaacataaactacacacacacacacacacacacacacacacacacacacacacacacatcagccaggtaccgtgattcatgcctgtaatcccaacacttggggaagatgacatgggaggatcccttgaggccaggagttggagaccagtctgggcaagatagcaagccccagtctctttaaaaaaaaaattatatgtatatatttatacacatacacacacacacatatatatatacacacacccctattaaagatgcatcgcaaatttgactctgtttccagtaagtgaaaaaagtagtatctgaaccacaacgaggtaccattttacacacctattaggatggctatttaaaaaatgaaaatatgccctgtgaaaacccgggagctcaaaagaaaaaaaaaaaccgttggcaaaatatgtggaaaaactggaacccttgtacattgctgctgggagtggaaaatggtgtagcctctgtgagaaacagttcagtggtctttaaaaatgttaattgtagaattaccatgtaacccagcaattccacttctagacatatactcaaagcagtaactcagatacttgtacatcaatgttcacagcagcattactcatgatagccaacatgtgggaacaacccatatgaccaacaggtgaatggataagtaaaatgtggtatatactacatatacaacggaatactattcagccataaaaaagtaaaagtataatgctacaaaatagatgaaccttgaaaacatgctaagtgaaataagccagacacatagtatggttccacttatatgagatatctagaacaggcaaattcatagagacagaaatagagtagacattacccagcagtggaggtgagggaagagagttaacggcttaatgaatacagaacttttgtttggaatgctggaaaagttttggagatggatagtggtcatggctgcatgacactgattgtacttaatgccactgagttgtgcatttaaaaatggttaaaatgataaaaaaaaaaaatactaggcatgttaagaatttagcatcagccaggcatggtggctcatgcctgtaatcccaacactttgggaggccaagacaggaggatcacttgagcccaggagttcaagaccagcctgagcaacatagcaagaccccatctcaaaagaaataaagaacttaaagtcaacttatttactaaagatattcaaataaagatatttagaaggaaaaaagtaaaacctgcggttataaaatttgcagcgcccatgaaataagaaaatgtttaggcgtaaaattctagcactagagcactagactgggactcaagctttgtattgattaatcctggacaaacaacaaaaaattatgacctccttgctgatccatggacacaccagactcccatcaggaccctgcccttcctaggatgctcagctaaataccacaaggcagctccccacctccaccaggtctctgctcaacctgcacaggaggccttttctgatccttccgttgaaaaagcctcttcctagctttacttttctccatagcagtgattacagtctgacatcctacccattttacatatttgttggtttattgtttatctccacaccagaatgcaagctttatgagtgcagagatttttatctctatcccagcagtgccttggctctcaataaatatttgttgaatgaatgcatgaataactgaagaagtcattttacctcaatgtcttcattattgaaacgaggtaaacatctgtgaaatacaaatatcagtagaaagtccaggattccaatgcagccagcctagctccagagtcctctaattacacaatattgctttggcacaaggcacagatcagtcactgttgaggaagcaaagatgaaccagaccaactcctaccctcatgcatggggcaagagatacaggagaacagaagcactgccgtgggaattcagaggttaccttcaacttgggggaggggcttattttgcgtccctaccccctccctgcccattccccaccctgtgtacaggatggtgcccgtgaccctgccacaacctttatgtaccacgccccattctctcctaccctatgacctgctcagaggtgacctgctgatgtcacctaactgggtctatagctgcatctctcctgcactccagattttaccaagaatgtctgaaaatgagcatcttaaaccaggcccagagaactttttaactcctcctgaactgactgtcagttcactgtgtccacggtgagatcagaaggctgctgtgtcctcactcccctgttgcctacggttggccaccttttcagagaccacatagcgtcttctctgaggctgtcctcagttacaggagaaagcagggtcaggtggaaagaaactggttggctttaaagatgttgtttctctgatttttttttaaaggaaatgcatactgtacacatgagagactccaaggctgagatgctgtggcagttgagatgcacctgggagctcctaactgttccctgcctctgcctcagagggcgggacggcagccattgcacaccaccccctccacagcaaaccagtcaagccttgtctctcccccccaccaaggggctcttcccctccagcagaggctttcctagtctctggtgtcacctatgcccttcctgtcccaggacaggaacagatacaccccgttggtgcttgctgtacttctacattcaaggcacaattttgtgtgtccctgcctaacctcaaccaggatgacttcgtcgtgggtagaagagatgacatcttattcatcagcctgctttgtcacttttgtatgtctcaaggtccagcatctgtccttgtgcctgtcactggagtgcagaattagactaaccatgctccatttacaaagagagagttttaaaacctttagcacatgaatgaatatttgtctctgcagcctccttaccaccaaatactcttaaggtcaagcttcggcttcccaggagtccgtgagccatttccctctcccagctccctcggcccggctgaattcgtgccagaactacaaaagcaagctgccgggtgaagtggtagaaaaccaaagcatgggagtcatgatgttaagcacaaatttttaaagaacaatttcatgcatttccacttgttaactcttagtccattcagaggctgaaggcaggtccagctctgcccttttctggcaagctgccttctagttgtgctgtggagggatgttcctggtgggcagctccccaggccagtgctgggatttgagtaatcacaggcccaagtagggtgtgtgggaaggtgtgctgtttggtctggctcacagccgctgacactctgcagctattttaaacggatcccacaacctt

SEQ ID NO: 457 - DNA, 2456 bp, Homo sapiens
tctctctgtcttctctgcttatcatggttaccaacaaaatgactgctgcctttagaaaccctagtgggaaacaggtggcgacagacaaagttgcagaaaagctgagctctactctctcatgggtgaagaacacagtatcgcatacagtcagtcagatggccagtcaggtggcaagtccatctacttcattacataccacatcctcatctaccacactatcaacaccagccctttcaccatcttccccatcacagttgagtccagacgacttagaactcctggctaaactggaagaacagaatagattgttagaaacggatagtaagtctttaagatctgtaaatgggtcaagaagaaacagtggctcttctcttgtgtcgagttcatcagcctctagcaacctcagtcaccttgaagaagattcttggattctttggggaagaattgttaatgaatgggaagatgtacgcaaaaagaaggaaaagcaagttaaggaacttgttcataaagggataccccatcactttagagcaatagtttggcaacttttatgcagtgcacaaagtatgccaattaaggatcagtattcagaactcctgaaaatgacctcgccttgtgaaaaattgatccgaagggacattgctagaacttaccctgaacacaacttttttaaggaaaaagatagccttggacaggaggttttatttaatgtaatgaaggcttactctttagtagatcgtgaggttggttactgtcaaggaagtgcttttatagttggattgttgcttatgcagatgccagaagaagaagctttctgtgtatttgttaaattaatgcaagattatagacttcgtgaactttttaaaccaagtatggcagaattgggcctttgtatgtaccagtttgaatgtatgatacaggagcatcttccagagctctttgtacattttcaatctcagagttttcatacctcaatgtatgcatcatcctggtttctgactatctttcttacaacttttccactaccagttgcaacaaggatatttgatatctttatgtctgagggtttagaaatagtgtttcgtgtaggattagcacttcttcagatgaatcaggcagaactgatgcaacttgacatggaagggatgttacagcactttcaaaaggtcattccacatcagtttgatggtgtcccagacaagctaatccaagcagcttaccaagtcaaatacaattcaaaaaaaatgaaaaagcttgaaaaggaatacactacaataaaaacgaaagaaatggaagagcaagttgaaattaaaaggttacgcacagaaaatagacttttaaaacagcgcatcgagacattagaaaaacataaatgcagttccaactacaacgaagattttgtgctacagctagagaaggaattggtccaagcccgactgagtgaagctgagtctcagtgtgcattaaaagagatgcaggataaagtcttggatatagagaagaggaataactcccttcctgatgagaataatattgcaaggcttcaggaagaactcattgctgtgaaacttagagaagcagaagccattatgggtttgaaagaacttagacagcaagtcaaggatttagaggaacactggcagcgccacttagctcgtactactgggagatggaaagacccacccaagaaaaatgctatgaatgagttacaggatgaactgatgaccattcgacttagagaagctgaaacacaagcagaaataagagaaataaaacaaaggatgatggaaatggaaacacagaaccagatcaatagtaaccatcttcgaagagcagaacaagaggtgattagcctacaggagaaagtgcagtatctttctgcacagaacaaaggactccttactcaattaagtgaagcaaagcgtaaacaagcagagattgaatgcaagaataaggaagaagtgatggctgtgaggcttcgggaagcagatagcatagctgctgtggctgaactacgacaacacattgctgagcttgaaatccagaaagaagaaggaaagcttcaaggacagcttaacaagtctgattctaaccagtatattggggaactgaaagatcagatagcagagctgaatcatgagctcaggtgcctaaaaggccagaggggcttctcaggccaacctccttttgatggaatccacattgtcaaccatttaataggagatgatgaatcattccattcctccgatgaagattttatagataattccttacaggaaactggtgttggttttcctttgcacggaaaatctggttcgatgtctttggaccccgcagtggcagatggtagtgagagcgaaacagaagacagtgtgctggagaccagagagagcaaccaagtggttcaaaaggagcggcccccgagaagaagagagtcgtattcaaccactgtctga

SEQ ID NO: 458 - protein, 806 aa, Homo sapiens
MVTNKMTAAFRNPSGKQVATDKVAEKLSSTLSWVKNTVSHTVSQMASQVDSTSLHTTSSSTTLSTPALSPSSPSQLSPDDLELLAKLEEQNRLLETDSKSLRSVNGSRRNSGSSLVSSSSASSNLSHLEEDSWILWGRIVNEWEDVRKKKEKQVKELVHKGIPHHFRAIVWQLLCSAQSMPIKDQYSELLKMTSPCEKLIRRDIARTYPEHNFFKEKDSLGQEVLFNVMKAYSLVDREVGYCQGSAFIVGLLLMQMPEEEAFCVFVKLMQDYRLRELFKPSMAELGLCMYQFECMIQEHLPELFVHFQSQSFHTSMYASSWFLTIFLTTFPLPVATRIFDIFMSEGLEIVFRVGLALLQMNQAELMQLDMEGMLQHFQKVIPHQFDGVPDKLIQAAYQVKYNSKKMKKLEKEYTTIKTKEMEEQVEIKRLRTENRLLKQRIETLEKHKCSSNYNEDFVLQLEKELVQARLSEAESQCALKEMQDKVLDIEKRNNSLPDENNIARLQEELIAVKLREAEAIMGLKELRQQVKDLEEHWQRHLARTTGRWKDPPKKNAMNELQDELMTIRLREAETQAEIREIKQRMMEMQNQINSNHLRRAEQEVISLQEKVQYLSAQNKGLLTQLSEAKRKQAEIECKNKEEVMAVRLREADSIAAVAELRQHIAELEIQKEEGKLQGQLNKSDSNQYIGELKDQIAELNHELRCLKGQRGFSGQPPFDGIHIVNHLIGDDESFHSSDEDFIDNSLQETGVGFPLHGKSGSMSLDPAVADGSESETEDSVLETRESNQVVQKERPPRRRESYSTTV

SEQ ID NO: 459 - DNA, 203132 bp, Mus musculus
  misc_feature (1)...(203132): n = A,T,C or G
ccaacgtcaaaaattcaaagaggtaaaaagtaattgtatatttttatagagttataatatgatgctttgatctgtgtatatgctgtagagtaattaaattggtgtatgtgttgattttgttttgagatagggtctccctatgtagctcaggctggccttgaactcacaatcctcctgcctttgcattctaagtactgaattataggtttccttcacctggctttatctcatacttgttaacttttgtgtttgtgaatgtgacaagaatatttggaatggtatcttaacaactttgaaatatacaatacttattagtagctactgtcagcatacaataaactcaaatgctctttctgcctgcctaactgaagcctgtgttctttgatccacatgtttccgtgtctacatttttttttttttttttttttttaagatttgcttgatttaaggccgaggatgtagctcagtgacagagttcgggcctagtctgtgtgaggccctgggtttaatctcgagcgctgaaagacagaaaaaaaaaaaaaaagttgtgatagtttctgcacacgcagtgcagtgagcaaaactgaggagctgagcgagctaggtttgactgtactaggataggagcaaggcacggagagaaaatgcccgccgtgaagcaggaagcagaccccacacgcaactggcagcttgcagtcggcctccagaactctgtgagatgcatgtgttgttggagcctaacaggacaggcttattaaaggacatggaactgaggcaagagaaaatgtggtgaagatgtgaacaaacttggtgaaaagaggaaacacaggaagggacaaacaccacacagaatgtataaataggctggcgatgtagttggaggtagagagctggcatagtacacacaggacctgggggtgatagtctgcactgtgcacacatacgtgcacacactcatgcatgcacatgtatgtgtgcttaggactggaagctgagagagactattaactagtaaggaataacttcctcatcatttgggtgaggaggagatggtgggtgaagcctcataggcaatcatgtccctatctattttgagacatattaccataatgacatgggaggctgataggtatgtgaggccatcagactgttatattattcatttattttattttgtgtatgtatgtgtgctgtgtatgtgttttttgtgccatggcacatgtgtggaggtaactccttatttttattttatatatgtgtgtgtgtgtgtataattaattaagagctaacattttgattacattgttcccttccctttcctccctcaaagccctctcaattccccccatctctttcaaattcatggtctttttttcccctctagttattattgcatatatgtatatgtatatatacaaagatacatatatatccctaaatataaccttctcagtccatatgatattagttatatgtgtgtattctttcttcctctctttctctctctctctctctctctctctctctctctctctctctctcagaaccccaagtaggtctcaaactcttgagccttctgtcttagcctcccagggtctgtgactctgagtgttcccctatgtccagcttgagggtttgaagagagagaaatcaaataaatctcttagaaaatgcccaggtgacctctaacacacttgctgggtagcacaaaggatggtggtcatacatttgatgtaagatttgtaggtggtaaaacataggcaggtcaatgagtaggagattctggtgggagccaggagtcattggaacttagacactgaaagcagtgagtccagtggggacacttcgtccttgaccccaccaggaagtctaactttctaacatcccaggcttggtttcttccagagaccaaagtaaataggaaatagagttttgagtacatccttaccaaaatcaaggcttggtccagggtgatgtttccgtgggtaaagttttcaccagctggtaatcatcaaatgctctctgcttggatctactgatgaggatccagtaagattaaaatgcttaggtatgttaattgtatctctaaataaagaaaatgaaaagtttacaaggaatagtcacctcacaacttttggctaaaacgtgtttattaacaaacaaacaaacaaacattaaaaagacaatgacccttgggggctggggtgtggctcacttgggagagtgtctgcctggtgtgcccttaccccaacaggaaggaaactgggtggtgcacacctgtgattccagaactctggaggcggaggcaggaagataaggagcttaagatttcccctggctatatatagggagagttgggggctagtctggggtacagaaggtcctgtcttataaaaaaagatacaatgaatggccccaaagcccctaaggatgggcctcttgtttacttgcactttgcaagtcttcttgagtctctataaactctcgcacagaaggtgaggatagcctgaagttgaccaagggcccacacccatccctgaactcttgaacattttgtgcttgtcaagtcatgagtttagatttataacatttaaagcttttggtacatatcctggatgcctgtgatcctattatgtcagctatctgggcagggagtccttatctaggcccaaactcacaaagagcaaacagaagaaacaaaagagggctagttctttgctgtggaaaatgggaggggtgtagggggtccccttttggtttcagctttcagctacatgggagaacaagccccacccgcacaccatctgctgcgtggagaccacaaagatcccaagtgggtttgttgttattttgaaatgctacaagttttctggcttcattggaacccctgctgtggggaaattgaaggcaggtgaattctggaaacctccatcctgggcctccctgagccgccgcttctcaggaaatggcatgctggcagaggctggtggtttaatgatcacagggaattcgcttcatgttttcatttcaaagccctggcaggactcgggtctaaagcaggtgctcatttggctctctgccctgcacgcagggccatcgaagagtcatttttccttgttaattggaattttgcctgttgcacattttatcagtccagacttaccccttctcagatacagatatagaaaactgtggctctaactttctgccttcaattataatgccgtatgagacgcccgcaagttcgccctggcgtcttcggaagcacactttcgaaatgaagttctaaggcgcccctgacaataggccagctaaagtgaaggtgagcctgcacgctggagtctgtggaccgcgcctgtcacagcagttttggaacagcgtttgctctgtcacacatccttcagagtggttgtgcaattgccctctggctgctcgctgcttgctgttcgctgtgcttgacaaactttaagctcacgtttgggcctgggtgaaaggagcctgtttttgtgaatgagtggaagtcaacagttccactcaacaaactttttattttattttattttattttattttattttattttattttattttattttttattaatctagtcaagttccagagagctttaaaacccaaaacaatgaaataagactttctaacctaggcacggggctcattgtcacctgtggtacagagtacagctgtagatatggactctggagcccagtaatcacctgactcagcctcttgcaggtaagtgactcagcctctctgagcatcctgtcatacttgatgatatgagggtaacagaactgttataggctttattttgctattcacatagacaaggcctcatagagatcaggttggcttcccacttccttacaaagccaaggctgacctcgaacttctgatcattctctctccacctccaaaactgctgggaatgcaggtacctgccatcatacctagtgtctatggtggtaaagataacacctagggcttcatgcatatgaagcaagcactgtgtcaacagagctatgttccccagccctggcacagggtctgattaattaaattcataaattataaagaatatactgagttctatatcaggactatggaaagaaaaaacaaccataggatttttaaaaatgaccagggctttcagaagattggagttcaggggggccagggcgaacctagagcaaacattacggacaaacaggttattacgcattttctcagttgcctgcttatcagtgggatctggagccatgccacaggatgagtcaccgtaagagtgagtccctgcttaggggagggactgttccttgagacagacacgggttctgtaaatcactgggactcggctgtcaaacatctcttgtgcaagtaagatgaagtattaaaaaaaaaaaaaaagtcagttctctttacagctcttcttgggggtgggggagaccatccgtttgcctgaacaagacctgcagaatgacaccaccagttgatgtgggggatgtgggtgggggaaatgtcacaaagccccacccttagatgaagagctgcaggcaattaaccagtcttctctagggatgaacccattggtagttgagtcagttctaaacacatacacataggagcaaccctaagtggacgcaaaaggttctctgtctctctgtctctgtctgtctgtctgtctgtctgtctctctgtctgtctgtctgtctgtctaaaacaataattaaagaagagatcatgaatttgagggtcagtagagggggacatagagttggaagaagaagaagaaggtgtagaaatgaagtaaatgcagtattcaagtatgagattctcaaaaaaaatatttaaagctcaaattaaaaatgaccatttgtgtgcctgctttaaaaaaaaaaaagttttctaccgagtatgaagtcttgaatggcttgtgcctagattcctcagaagggaaggcaggaagatcagtagttctcacattgtgttacacatcaggttacaggacaaagtgggacacttgagaccctgcctcaaaccaaagaaacaataaaagcaaacaaacaaacaaacagaaatggatgaaaccggcaaaaggaaatttctcaagatactacctcggtccaaaggaagatggtctctatggcaacagctgacattcaggccagggaggtagcttagtaggagagaatgcttgatgccctgacctgagtttgatccctaaaatctgcatcatggagagagaaagccaactccagaaagtcaagacatgatatgtgcatacaaataaacaaaggggaaaagatttaaagtgatgctacctctgcattcacagctagtgaattctgaagtgatgtcacctctgcacacacagctagttagtgaatactgattcagtccttttgttttctcatgacgtgtgccctctcatgttgtcaatatggaagcttctggcggtcaagcctgctggttaaggatttgaactcaaggtagataagtattcctacttagtagctacaggcttctgttcgtacacaggacttggagagtgtgttcgtatggatagaacattagtatcctgattggcaaagagtaattgggttttattttttaattttaagttttttttggaaaagtacttcctttttttaaaaaaaatgttttgttttaagatttatttatttattttatgtatgtgaatacattgttgctgtctacagacacaccagaagaggacgtaagatcccattacagatggttgtgagccaccatgtggttgccaggaattgaactcaggacctctagaagagcagttagtaatcttaaccactgagccatctctccagcccagtaactgggttttaaaagtggtgtcatttgggctctatggataggtacttcatcagtcttcaaagacaaaggctatgtaattgaggttggacctcatgatcctcttgccgtatccataccatacttggtaatttaagggttgaattaaataatcctgcccagttcaagcgctcatgtgtgcacttgagactaaaggcatgacttgaggcatcaatgctgtgtactcaagtgtaaagaaatctggaggcctaaagttaaactgtgttcaggcctgggctcactggcctgggtcttgtttcttcaggatattatatctattagcatttgcaataccttagctcccactctcaaacactgcttgtttcttcaggatattgtgtctattagtatttccagtaccttagctctcattctcaaacaatgcttagcacctatcggtaaggtgttgtgttcagtaccttgctgtggctgtggtgaaacaccctgagcaaggcaagttacaggaggcacagtttacttggtttatggtgtaagaatctaccatgtcagggtagaaacgtaaagcaagcattggtgatgctctcatgagcagggagccaagagattgcacctttaatagcaaacaccaaacagaatgaactggaagtggggagaggctgtaagggctcagagacgctccccaccaactgatgtactccccccagcaaagccccatgagtggtgccccatgttccctccccaagcagcaccaccaactgggaaccaagcgttcatgcctgagcctctaggggctggggggtggggtggggcatgactcattcaaatcaccacagatacccaacaaagagagtttcatagtaactcatttgattaatgatataaatcattacaacgaatctctgtagctacatataaacacatggaagaagtgagaagcagttcccgttttctcaagtagtggcttccaataactttctattaaagttcagtccgtgtgtagagcacttagtgtgcatgaaacctgtctccatccccggcaccacataaaatcaggcgtggtggcaatgcctgtaaccctcccaggaatcatgagatggaggcaggaagagctgacgttcaaagtcatcctgggctacacgagacctcatcataaagtgaaaataaatataacagaactcatgctctgtcacagtggctctcaaccttcctagccctgtgaccccttaatataacccctcatgttgtgtgacaccccccctccccataaaatcattccgttgctccttcagagctgtatctttgctactgctatgaattgtaaagtaagcagatctgtgttttccctgcatggtaacctgtaaaagtgagtgttagtttttacatccccacactggtgtgcaagtgttctcgtttctctggtgcttgccagacattatcatttacctctttgatagccattcagtgggattgggcatccgtggttttaattttttgctttcctgatggttactggtgctaggcatatttcgtggtcccgtgggtcatttggatggatgtcagtgtactggtctagccacttcctcctggtgctgctcatctgtgtgctgctggggtttggaggctgttgtgctgtgtgccttgtggattgatatcagcctcttgtcacctattgttgtgtgtcacacactcccgatctctggcttgttgctcccttttgttatttgttatcattgctgagcacaagttttatataatcaatcccatttgtctgctcttacttttttttgtttagtatcttatcctagggtaatctttgccattgcaatgtcaaaaacccaaaatccacccaccaaagtgtcttccaatggtcttaggtgaccccaaaggggttgaaacccacatgctgacactggaagcctcctccatggggtgtgctggctggcccatgcctgtgaccttgaacttgggaagtatgaggcagaagcaggagaaatgagagttcaagggcaggcttcactacttaatgagttggagaccctgaattacttgagacctattcaaaggaaaactaacccaaaacaaaacaacatcaacaacaaaaccctaaaaccctaccactcaattctcctcgttagaagcctagcacttttagaggaaggctgaagtggaagcttaagggttctttcgaaagtcagttgtgttaggtggtgttttgctggggcaaacatgtgaaggagtgttttcctgaagcagacacaggtgtacgtttaaggcagtgaaaggaacattccactgaagcagacacaagtgagaggatgttctgctaaagcaagcacgtgaaaggacatgtgataaaagattctttgctagtgacagacacatatattggtccgccttccattgcatagttgagctccatttgtcaggacttcaaagagagaaacacaccaagaaacttaggtggcgtgacacagtttcttgtggcttccatggactcgggctgattgacagagtgatgtcagctgagacagactcacgtgctgaggcaagacctgtggggaggcaagacccgcagaggacataaggcgtttgaagggtataagtaaaactccatggacagtaacagagtatagctaggattgtttatagagctagcggtgtaatgctggtcggtttggaatctttgctgatcttcgcttctcagaggggcatagctgagagcttctcctgacattcctgttggtccctgctgctgctgaggctgaggcctggctgtttctgctacgtagtgccaccgctgttgatttgtgttgactatcctgactctactgaacttcatatatctgtgaagtgtttgcgagtggatccaactgtctcttcaaacctgtgaactgaactacagatttccagacaacacagatgggagttgctccaaagaacctttctaaacaggtctacttccccatatcctttggtttttcctacttctctggagggtggtgggcaagaagggaggttaaagtgtttaagaaacatcattaaaaataggctttaaaaacttaaaattacaaaagtctagctgggctactcatttgtgcaaaggttccctgacgatccagcagctgtcaagactggaaacttgtctttgaaccagacacttcagtcactccatctgttgtggcacctgtagagtttcccgtgaagtaactggtgacagaattccatggataaaggtgcttgctgccaaccctgaagaaatgcaccaaagatggattcttgggccctacttgaggaaagggagaaagttgtcttctgacctctactctggccaaggctggttctgaacttgtgattcttctgccgtacttggttgtatgtggtgctggggctcaaactcagggctctgtgtatgctgggcaaatacattactaccgagctatagccccaatgggcaattcaccttttaatagaaagtgaagcgtaaacagtgccagatttgtgttggtgactgaagtagctgcattcaactcttgcaaagcacattcatgcaggcaggaccctgtgtgctcgcctatcctgtgttcagagggccgcggggaaaccgtaggaatggaattcagcagctggagaaggcactttaattcagcagctggagaaggcactttgagctaggctgtagaaagtaagagaccctgaccacaccacaagagcatatctttagataaccgaaactggagaaaaaccaaactggggcagaatgaatgtgtgcatggggcttcgatgtgggaatgggtttctctgagattttttttaaaggaatttttatatcaacaaccaggaatccaataaaactatcttctcctaaggccctggtagtttgaaggatctagggaaaggcagcgagtcttcgcagtgcgcgccacatcccgggtactccacacttcttccaggccggggatgcccagctgtcatcccatctcgggccgaacccccccccccccccccacacacacacacacccgacttcctttctatccttacagctccagccttctctgcccgaagggaagcacaggctggagcaagctctctaggctcatccatcagcagtggaggaggaggagaggaggggcaggaggaggagtttctaggcggccgagcccccgaggcccgcggtgcccttcccccctttcgctgattgctgtggctgcgcgcccgaccccgcccgcgcgtgtgcgcggccgagttagggcgccgcacgggcctgatgggggtgatccaggctttcggggacgccgagcgccactttcctcctccctggcagtgagagagagagagaggtggagagggagaagcgggctgctgtccttccaggccactttcgctgcgcgattccgcgagctcccggcaggaggtgaaagtccccggcggggtccggatggcgcagttgaactgcggctgctgagctcgcggccgcctgcgcgcgctgggcgcggggactcgtctgggctactcccccacctcgcgttggacgaccggtcctggacacaccgcttgcgaggtacgtgcggtttggcgccctatcagaggctgtgcacgctgcgtagtgcgggtcggtgcctgctttgcggggttgctctggccatccaggaccccgaggctgggacctggctttggtcccgcagggttgacgctgagcggaaccgggatccgctgcggtcccgggtgggcagcgccggggaggagttccccacacccgctttcgctcttcctctccacggtttcctagtcccgtgcggggctgcaggccactgcgctcctggcgcgtgacagcgtgggtgggcactcgaccatgatgggtagcagaggccgcggccgcgggactcgcgcgccaacgccagtcctgggtccccgctggccgcgccctggctcggggagtcagtcccgaaaacgctgtgaaggacgctcccgggttaaccttgtggcgctcccgctgatggtagaggctccctacgatttgtgaacttggttgggacaaacttgaaactcttggatgttgctagaggaatccgcttgtagagttgggcttattggggcatttgtcccaccttcccgcaccggataggagtgcagacagctggagtgacaagccgcaagtatcacggcttaggtgttggtgcaaacagttgccctactcgctaaccgtgaactgggaggacacggtcccccaaggtggctgtgcggtttggaggagtgcacagatgtttctgactgggaccgtgcggagcgcagcacaggtgttagcgcctcgtgctgcgccctgctgtgacaggagagccgcgaggataggcatcccgtgagtgtcagactgagataaagaaccagccaatttaaaatttcttctttcttcgaagaagtgagcggtttgggagggtaccaacacgcaaaaaaacccatatcgggatcctttaatatccagggaatggccctttagattgtagcgggtaattttagggagagctcagcaggtccttttggggtactaaaacgggaatatattgatccctccctgtatgtcagtatctccagcaactccagctagttcctgtcagggcttaaagactacgtcaactctggttcaaagtgattttagtggacccattttacagatcatatatgctagactccagcagctagaggcaaagttacttgtccaaggtcacatagagctttctgttacttttaacccaagagctgcctcggtcagtcatggcggaaagtgtggtaagatccatgggccctaagtccttggccctctgttctcacccagcttcctgtctgagttgaatacatcttttgaaacacagatacaaattatctgtgattaatttagaggatcatatacgtatgtactttgcaggagccagaatccagcttctctgagtctgggtccaaataattataaatagaactctgactcgtgttaatttcaatctttattcttcattacttttattaatccaccagacattgttgatcaaggccgcttggcttccttaggaaacagcttgaggctggcacaggaggcagggaaataattcttaccccctgaagggctattaaagacgacttgatttcatgccattgtctcagcaagaggatgttgctctgtttcttgatgttctctgcttttggctttaattctgcattgtttagcatttcaaggcttaggcatacttttttctcttgacattgttgtcagctttaaacgtcccctattgtgatggaatctggccaccccacaccacctttgcttaactgttgattaagatatgtacattaaaaaacaataaagtcatcaactgagttttgaaccccagcacttcaaaggcctatgccttgagaaattcattgttattttaaacactagccagcagggggcgcacagcatattattgatgtcctgctgacatctagacctgtttgtactgtgtgtagcatatatttcagaaatggaaattattgtagctttatctagtacagtaactaagttgctttacgattaattccaactggttaaaagtgggatgatcttgagttccgggcctgaatgttaaatgtgtgtctagaacctgtagtgactaggtaaatatttaaatacaaatcacagggttccccccccctccttctagtttgcttttccttgagaggtatgtctgtaagattttgtgttgtttgaatagcactttaggttatttagaagtggcaatctaaagagattcatttgagagtcctttagtaatgactcccattgtctcatttataaaactgaatgcacgaactcattcttgaggaggctgacggactcagtactgtcatcatcatctttcattagcattttcctcatgtaagggagcccgttatcctgtgtcccttttatagagctgaacatgctgcagacatttttgttttttgttttgttttgttttgtttttttgtttgtttgttttggtttttcgagacagagtttcctgtagcccctggctgtcctggaactcactctgtnnnnnnnnnnnnnnnnnnnnattaaaggcatgtgccaccactgcccgacagacatgtatgttttaattcagtgtgagttccctcatcaaaagtgtttgggggtgcccgcgcactcaggaagcagaggcaggaggatctctgtgagttggaggccagcctgctctgcagagccagttctaggacagccagggctacacgcacagtgaaaccttgtctcaaaaaaataaaatgcttgtgagtaaaagggctttggatttgttcagactttggaatatctgatgtgcataatgatctcctgggagagggaactgggtctaaacataatttgtgtgcaatatatatctgaaaacataaaggtagtttcgtacaatgtttttagtgtatctgtgtcttgagttcagctagttatatgacatcgggtggaattttccacttgtcagccttgtgctgaaaaagttatagatttggagacgctttggatgttagattttgggtcaggggtgttcaatttgtatgtcaatagttcaaagccatattctgcatgagtacaggtatctggtgtgtctaggcatccgaggtccctattttaaataatgattttaatagctatttcagtcagttccttaaactgtcaaacattgcatttttccacattaaaaaatcttttaactagtttttgaaatttacgtaactggttaggttcatggttttagagatttttaacttagatgttctctttcactgccttaggagagtggccagttaagaatgtgagggtgagcatagattataagaataactactattcctattattttgaagtgctagggtttgagtcaagggtcttatgcatacgaggcgagcaccaggtctctgagctacactcccacaccccgaaagttatccctacaggagcatcggtgagtaagagattccgtgaggtgtctgcatcagtagaacacacacacctggcacaggaagttctttggtttccctgtcttcagtctcaagtgtgaagtgttagcaatgcttctttgcagcattttgtaaaaacgcaaactgttgctaatttgttcagtttctagtcaggctgaaataaaccaaacaccacttggaaaaactgctaaaatgatctgggtccattttctgggctctggatttcttgttgttatagcctttgaaatcacacatttacttgttaattgacttacttgctccatttacaaagtccttgctaaggtttaacatgtatttctaagcgtgcctgctctcctcctcagcctcccccccccgccccccccccccgaaaccttagggagaggtccagttatttggatctccagatctctcagccaagaaatgtaatattttgggtttgactcagcatttgtataaattctctttggggctactcttgtgggccttattttacagtttttccttaatttttttcggacgaaagatggagatttaaataggctaacaactacttataaggcttgtatttaagaaggaaagactggaggagagccccagaaacacatctgtaggccaccctaatgcacctgccaatgagtattgtatagggtgtgcatatgtgcattagtgtgcacagtattgctatctggtatttgtgtcagcaactgctgtgtgttgaaatttctttcagccaagcgtagtggaccatacctctcacttcagcccttgggaggtagaggcaggaaaatcaggaattccaaatcagcttacaatccatagtgagtctgaagccagcctgggctacatggaccctgtcatgggaaaaaaaaatcccccaaaacaaaaacaaaaaacaaaagcttttccaaatctggggaaaggactctaagtgatgtgtaaatgtgagcaagtttcatttttatttcaaatttaatgtcagattgtcaccagaataatcattgaaattaagttagattagtaccaaacttctgtttactttaggaaaatggataacagaaaagtgtctgtttcttgggtgtcaggttgtgactgagaaggacctgtggggtttggtaccgtttgcactgggaagggcacctgtttttctgtccctccaaatacataattaatttttctggcatatgctgaaggtcaggttgttgtatacaattacagaaggaccgtttgtgaaaacacatttcatttggttagtttgtggtggtgggaaataaaaaccctctttagagagtaccccgtgaagtgctctctaaagagagtccggagcctttcccctcatctgatcatcctcgggctcactggcgtggtgcactgaacggcccacgtggagggtctggcaggacattgcattttctttttactgcttgagtctttttcgtggaaacttgatgaatacttagttccatgtggttgtgtcatcctgttagcatcttagcaattcatgtgctttgacagtgtgatgctggcccttggatacagcaccatgctggtggctgtttgcacatttcacttcataattacctaactgtgcaataattgctcgagtagactatgacttttcttttccctcacattaggagggttatttgaggtgagacactttgacacaaagcctaaataaatatcattgtgcaagcctctttgtgttgttggtagttgtcccttctgtggcttttactcttaaaacagaatgcactcaaacacaaacctttctcggtatccttaaagggtgtgcgcccttttcttacatgactttatgcagtgggctggcaagttcagtttgactggggggaaagcaccatggagtcatagtgtgtgctgagcatcaaggcagtatcaggtcttccctgtgtggggggaagtttctcatcttctaaatgggtctacctctttctgccaaggcctttctgtccagacattcttcttcattttctattctttcttgtttgtttgtttttacctttatgactttagagaggaggttacatgttgtatatttatagcataccatgtgaaccatgaacagcgtatgagcaatggcctgttttgtgcagagacagctgcactcgtcttggtttctgatccctcctattcacacctgaccacagttgcagcctggcattggattcatgatgttttccacggcagctcagggaggacagacctgtgcttttttccctgtggttctctgcgaatgccttttcagtttgtggcatctgtgtttccttgttagagtgtctgttcacagttttagttttattcagtgtgtgggcttagagaaagagatttcttttaaaaggggttctgcaagttcttgaaaacgcctccagaaaatgtctcaggtagatgtcatttgaattggggatttgaattggggctggttgaacccagggtgggattctttggagtttaactgggttgggagtctgggaaagagaagagtgtctctcctgttggatagctggagaaagcttcactgtgttgggaagggactgatagcaagttttaggtgtgcaggcaggaactccaaggctgcctcaggttggtgttgcagctggcaactcttagcatcccaaagatactgttctccaaaagccagggaaaacagcctggctccaattatgcatattgcgcgcatgcacacgtgaagctaagccaagaaaaatgtccatctgggatacgggttggtgttctgaagagaggaagaacaaaggacaatcgatacgaaccttagagaatctgctagtttttcttttggcttccagatgcctctcaagtgctttgtattggagattagaagcaattttagggttgagttttttggtccctatgttttgcagagaacagaagagcaagcagctaggcagcttttggtggtgctaaaggaaagagggttctgggacccagctggtgtgtttgagaaagcttttcccaccttcacagtgccagaatagggtgcaaggtcctcccccctttcctcacaccttccccgtgttttccatgcagctgtggtgtctaggctcagcggtactctagactctgtgggaggatgttagaggcaaggtgtgtaggcagctggatgatgaacatgaacacattgtccttcacaccaggcagaaacaacttgctcgttctctctctcttgctctctctctctctctctgggatgtcatatgcccaggctgacctcaaactggtagttttaaggcttcctgttcaatatcaagtccctgtttgttggcacttatgttagcccactttctgttgctaccacagaatagcccaaactgagtgatttatacagaataaaggctgggagactaagcttgtgaggtacttgttgctggtggtggtagaggggctctgccaagtcctcagataatataaggggagacggcatcctagctcaggtgcctctcctcagggccctagccttataacagctccaagccttaattgccatctcacagtggccttgcctccagtcaccacagctgggtccagctctgtcctctggctccttcataaaggatattaaatttcaatgtaggttccggtgagggacatccacactgttaacacttttcctgcccatctttcttctcagcctacatatagtcaatgaccctattcattctagaaacttctagttttctgttttagagccatgttcacagcagtctgtaggcagcctcatgtggttcaaacaggtcatcccattaaattaagcataccttctaacttcctatatactctgcagcccattgtcctcgtcacttttcatgtcatccttgctgctgtccccctgtgcatcgatgtggtctgagctcagcgctgttggtctttctgcttggatgggaaggcgtcctgggacttgcaaggccaggaaccacatagctctgaggtgggacagtgtcccaatggacaggtgtcctgcaacatgggaactcaagaaccacacagttctgagaggaagcctcctcagcagaggcgttgcagctccccagggagggtatccccagctgagctcaggagctcagaggcctcagtctgctcggtcttgcttctctccttttctttattgcttgtcttcttctgatgagagaatcacaccaggcagcaaatctcattgaaagagatttattggaaggtcaaagacgtggaggaacgaattcaggactggctgcctatgctcctggaagggatcagacagcagcaaggaattggacaaagtgcaatgtttttatgggggcttttgtgggttggagcgttctagggtggagatttccacggtaaagattggttggatttcaagtcctgagcttgagggagctcagggattggtgggttttcctgttcagggattggtggcttttgtttagacttttcatctaaattagcataacccagggagggtcctgttgagggtctgcagatgacagtctggagatgacctttgtgatagttacgatagttgggagggttagggtaagggaggggcctagctgatggagctccaccccaccccacctccaggccctggccacttttctttcttaaggtctacaaagtttacaaagtatacaaagtttacaaagtatacaaagtttacaaagggagtccacagcagggaaagccttctctgacacttgagtggtgtgaatatctaacaggtgcatctctgcagatagcatcctcccctttcctcccaggtcttcccaggaccctgactattcccatcatcttccagctgtttcttgtggtttctgcatccaagttctcgtccgtgatcactggtacctttgaaagcacatctcactttgtgtcgcttggatcttgcagatttgtgattctgttctccttagcatggactgtatgattattaaaattttagccattttcccctctgcttctcttgaacctcagtgtgttcacctgaggcagctctgatttcccaagtgttccatgtgcgttcacatcctgtttctttcataaccacacttttataaccagtgtgccctactcttccagcctcctctgttagcttaaagttttactctgtcaacagataccatgaccaaggcaagtcttataaaggacaatctttaattggggctggcttaccggttctgaggttcagtccattatcatcatggtgggaagcatgggttccacatcttgttctgaaggcaaacaggagaagattgtcttgcaagcagctaggaggagggtctcaaagcccactccacagtgacacacttcctccatcaagaccacacctcctaatagtgccactccctgggccaagcgtattcaaaccaccacactgtcgttagctcttctgttgaagcttcacagggttcctctctgaagtgacttctcttggtagctcacaagaacctctttctttctgtgaactatcctcgattaaaactgagggtaaggtcagcttttcatcaccataacaaaaatacctgagatcattagcttataaagagaaaaggttgctctcggctcaccgttttggggggtcttgttcagaattgtgggcctgtggtaaggcagcacatgtggtgggaagcatgacaacaaaattattagcctcatgtctaggcaggaatagaaaaggctgcggtctcatcacctcttcaagtgcctgtcttcaatggcctaaaggcctctcactataacctgcctcctgaaggttttaccactccacatgatgcctttaataaatcagtcttttggggaatattctgttcttccagatatctgaaggtcacttcctatagatccttagtcaaaacaaagaaacttaagactcccacctgatatacagttatgtgtcatgcttatgctgtctccagggctcccagggcaggtacttgtacattttgtgccttgtatccccatattggaggcagtagctggtgtggagcaagtctctcagaactgtagtgtttgttgagtgaataaatgaatcagaagaagcaggacctgggagggtttgatagcttcagtttagcatacactcaggtatctcttctgcagggaggtagagaacctgaattttcactgcctcattggagacaagctgggctgggacactggcgactctcccagcctttcaactggtttgggagattcccattctacctccagcaggcaagggcttgttgtggtttctctctgcctgtggtttgccctttaacccatcctgctaaaaagatgaaaaataaacctggcagcagaggaaggggtttggggagagggcgtgcagagcagaaggcagctcttgctgtgcccctacatcctcctttggctctgagctcatcctgttggcagctcactgaactatccagatcggccctgctagggcctgcgctacagtagcctgaagtctgccaggcctcatgtcttttgaattttttttccttcttctttgtcctattttctttgaaaagaaatgttccacttcaggcaagaaggacatgggaggaaattacattactatctttaattatttattattttgggatggtctcatgtagtccaggctaccctcaaacgcaagactatcctgcatctacctcctgtgtgctgggattacaggtgtgcaccatcatacccagttttttttttttttactatcttagttaagaatatttttaaagattaatttttattgtgttttatttgtgtgcatgcacacatgcatacatgcacatgtgtggggttccgttttctcctatcctgtgggctctggcatcaagctcaggttggcaggctatgcaagagtccctacccactgatccatctcacctgcagcccatctttaagatgaagtggagttttaacccttctcagattcaaggactgttggtgaagctagttcttgcttctgtctgtgatgctagtgatgggtggaaacttcatgaagcagtcacttaatcctaagggccaggaattttcctgctgaagagtcaggattttggagcccagtgtatgtgggccaaagcgtgtggccagtgtcattgtgcctattgagagaatatcaatttggtcttctcaggacaggaagtccaaggcttcaaagaagtggggctggtgagatggctcagccggtaagagtactgactgctcttctgaaggtcctgagttcaaatcccagtaaccacatggtggctcacaaccatccgtaatgagatctgacgccatcttctggtgtgtctaaagacagctacagtgtacttacatataataataaataaatctttaaaacaaacaaacaagctattataaagtcagcattataatgtagccctgggattaaagatgatcaggttagaaataaactgatatgtgtgacatcatatatatgtcaatatgatatatctatatcatatgttatatgaaataaaatgatagagctactagtggctagttgaagggggtcctagtcacctgacagctttctaggtattctttttttttaaaaatttattttattttatttattttttcaattaggtactttcttcattcannnnnnnnnnnnnnnnnnnnnnnnnnnnnnnnnnnnnnnnnnnnnnnnnnnnnnnnnnnnnnnnnnnnnnnnnnnnnnnnnnnnnnnnnnnnnnnnnnnnnnnnnnnnnnnnnnnnnnnnnnnnnnnnnnnnnnnnnnnnnnnnnnnnnnnnnnnnnnnnnnnnnnnnnnnnnnnnnnnnnnnnnnnnnnnnnnnnnnnnnnnnnnnnnnnnnnnnnnnnnnnnnnnnnnnnnnnnnnnnnnnnnnnnnnnnnnnnnnnnnnnnnnnnnnnnnnnnnnnnnnnnnnnnnnnnnnnnnnnnnnnnnnnnnnnnnnnnnnnnnnnnnnnnnnnnnnnnnnnnnnnnnnnnnnnnnnnnnnnnnnnnnnnnnnnnnnnnnnnnnnnnnnnnnnnnnnnnnnnnnnnnnnnnnnnnnnnnnnnnnnnnnnnnnnnnnnnnnnnnnnnnnnnnnnnnnnnnnnnnnnnnnnnnnnnnnnnnnnnnnnnnnnnnnnnnnnnatcaccaggggcggagggcaccacacttccctctacagtgtactgtggttggcgtcatgatcccatgcttcacttctcttggggcctcccattctgcttctctccccaccccttggctttttcttgttacagtgtttctttctcctctgccgggaggtcttccctgactactctggcacagactcagcatcaccaaaccagctgttttcctagtccccactggaagccagactccatgacaaagatgaactgaagccaccaacctgtgtttagctcccgagggtctaacacacaatagttacttctaaagttttgttgagttaatgaatgagggacaaactttgccatactgatttcaaaacaaagtaacttgtgcctatgtcagccctcatcagctaggagctgtccccttgtccccatccaatgcccaaagtgatgtaggaatgtgcacagcccctttcctttctttttctattttttttccttggttgttagctatttctggcagagcccctgtttatagtggctaaaagcatggactgtggaattagacagacttgggctcaaatcctggtccagggcttcttagttggtgaccttggcgttgcttagcaacttaaaggaagcacccatctctgtgggtggttgagaggattaagtgagaaatcatggagcatacagcaggtgctctgtagctagtcactgagatgctgtatggtgtcagagacgaaagccaggtactgaagtctcctcggaaggggataaggtttgcacattcgaatggtcagagcagttagaacacagcctgggaggaaggcaacagagggccagtcatggagccttctgaattctcggtttgcctatctgtaagagactgatgtggatacacccgtttctaacaccctctgttggctcagaataggtgtaacatggggtacattacacaaagaccataaggctgggattaatcataagtgggctttagaatggggagagagaaatgaggagaggtctcagaccttgaagacacatgtcaggttttaataaaaaaaaaggcgaatataaacttacgtctctctctctctctctctctctgtgtgtgtgtgtgtgtgtgtgtgtgtgtgtgtgtgtgtaataaataaaatgaacagtcctgacagaaggtggagttaaatgcttgcattgctgggagcatactgcatttttgttcccgtaagttccagagaaaaattttcgagtgtaatctgagtgttctctttaccactgagctgtgaggttgaatgttcgttctcctgggacagtgtgttctggcttttctcagttcctgccagaccttgcacagtgaggcatttgaagcttccacaggaatggatggtagcttgtttactgtgagagattctcatcactgtccattcagatgacaactgtgtggaaggcatggaagaaaaacaattctttaatctattcatactaaagatgaacaaagtgaaggcctaggaggcctttgggtggcagagctcttgcctcctgcgtgctagggtgctcagggttcctcgttgtatctgcctcttgtttgcctgtcatttgttactaaaaatgttccaacaaattcctggccttccataaatttcctattgtatacaatagtgtcttgtcttcttttcttgatgataacaatctagcccagggtcttaagcatgctataggcacaggcccatcactgagctatccttttttgctggctagttttattttgcctgatacagactggagcaccgtgtgtctcattcagcatcctattgcaatgaagaaatgccacatcaaggcaaatcttataaacatggtggcccacatggcgctggggcagctgaaaggtacatcgtgattcacaggccaagagagagaaaaagaaagagccctggcctggcatgggcaaagcccacctccaaggtttcaaaaaaacctcaaaatgacatacttcctccaataaggccatgccttccaattcttctaatcgaagtccctgatgactaagcattctaatatatgagcctataggggccaatggtattcaaactaccacacctgggaagagacatgtctatgtgcactttcttgattgacagtgatgtggaagggaccatcctatgaaggatggcagtacccttgagcagtaggcctgggttgtataagcaagcaggcaagccaaggactggagagatggcttagtggttaagagcactgactgctcttccagaggtcctgagttcaattcccagcaaccacatggtggctcacatccatctgtaatgggaactgatgctctcttctggtgtgtctgaagacagcaacagtatactcacatacattaaataaatagataaataaataaatattgaaagaaaggaaggaaaagaaagaaagccagccagccaaggaagccatggcgagcaagccgggaagcggtgttgaatcgccttcctagagttcctacctttgtttgcctccgagattgactgaaacctgaaagtcaaataagccaattccttctcaagtggctctcagtcagtgttttatcctagtgacctagagcacccactccggtccctgcttattcaacagaaccctgctggaatccttgcaccatcacgactaaaacccctggttctgaatcgtttgggtggcttactggccctgccagtctgaattccacagtctcctgcgtaaacctctgcagatttgggatccagcaggtagaaaaggagggctgtgcagccaggtcctgaccttagccagtggagtccaggcaacttctctcgatggggaacagcaagcagttacaacggttgctagggctcatgtccttttttttttttttctttctttctggttttgagaaaacatcttgctggcctggaagttgcagcgtagatcaggctggtgttgagtttgtggtagttttttttatgtcatctcttgagtgctaggattacagatgtcacccagcacacctggctcagggctgctttgcttgcttgcttgcttgcttgcttgatttagtttgtgtgtgtgtgtgtgtgtgtgtgtgtgcaagcatgcccatagcaaccaagtagtggtcagagggtactttgaggaactgattcttccctgctaccttgtgggatctggggatcaaattcagtcaaattcctttagactgttgaagcatctctacctgttgagttatcttgtctactcaagactcatctcctatcttgaaagcattctttaaatgttttttttttctttccatttttattaggtatttagctcatttacatttccaatgctataccaaaagtcccccatacccacccacacccactcccctacccgcccactccccctttttggccctggcgttcccctttgactttaaaattaagtgtacgtgcttgtctctgtgtggggatgtgcccctgagtgaaggtgcccatggagaccagaggctggggagcctcggagaggtttgaccttagtctctgtctcctctactcacaccagactcccttagagctcctgtccttccagcacttgagaagtagaagcagagggatcaggagttcaagatcatccttggatgggctggcgagatggctcagtggttaagagcactgactactcttccaaaggtcctgagttcaaattctggcaaccacatggtggctcaccgccacctgtaaagagatctgtgtctgaagtcagctacagtgtattcatgttgataataaagaaatctttgggcctgagcaagcagagttgaccagggctaacagaggtcctaaaacattcagttcccaacaaccacatgaaggctcacagctacagctacagtgtagagctacatggaaactctcccacctggtccaccctctctcctggctaagaacatcaacaccgggcctagcgctttctctttccttgagactgaactgcattttatccttgaaaccctaggtgtgcctggttagcccctggctcaggagtggctcagacatggagaagttagcagagccatggtgtgctgcagcccttccgtcattggcccttaatgtggacagggctaaagcttccatctctctcacacatgacccagcccacagccctgtgggcctctggctcctgatccctagtcacctgacctctcactcccctgtagcccctgttcaggtgttaagacccatctgaattttgggcagcactgtatcataccctaacccctacagtatacgcactgcaaagccaagccaagccgtcctctcaactgtgctcttaactgtggatgtgacctgactggctgcttcaagttcatgaccctttgaccagagggtttgacactcacccaggtttctctgtgtctgaccttttaggatgtgggtcttcctaagaacacttcctttggacttcttaccatactgtataattctgtattcgtgactatgtgcctgtcttgccagactgtaagcccagaagcgtaaaacacaagcgctttgattgcccaccacatttccactacctgatgcggcacaaagagtacataaaggtctgttgacagaggaaaggacgctccagaagctaaatgtctcgagtagcaagtgatgctgccttcataatgccaaacaaaggcagaggtttggttactcttcatattgccacacccttggcaccttggctggtgcctggcacagagtggtagtaaatatttgctgaatatcaactatacttagatatgattccagagatttcttatctaaatcctctcccctccccctctgggggcctgaatgatccagcttctctgtgtggaggaggcctggcagtagctgctgtgggcatctgcatacaggtctaaagggcattcaagtgttaccagacacagcagctactgctctgtgtccccctccctggctgccgcgctaccctctgatgttgtaatccacactgccttccctgagtagcactgagtagcagtcagaaccgtgctgccagcttttattgaaccattttcaaacctgtgtttttatcacaaaaaggaaagaagagaagagaaaagaagagaaaatcatctaactgacaaagttgaaacatttaaaatttttagtgtgtatgtatgtgtgtgcgcatgcatggacaagctcgggtgtgtgcatgtgacctcgggtgtggctgtgtcgtgacattcatgtggaaggttaaagaacaacttccatgcgtcggctctctccttttattccagggattagattcaggtctctgggtttgtacagcacgtgtacttttgcctgctgagccattttgcccagtctattcatttctaagccattggaaactcggggataacttattactgaagttcaggccaggtcaattttccctttttgatgttttgagtagtggttgcatacagcctaggctggcctggagcttgctacgtagcaacagatgatgttggacttcttgatccttctgcctctgcctctgcagtgctgtgagttcaggcataaaccaggatgcctgctttatgtggtactgtggaatgtaggactttatgtgaggtaaacaagcattctaccaacagaaccacaccccaccccacccccactctccaccgttgtaattccactcactgtatcagtccctgtgagctctctcagccagtaagtactgactactgacaacccaagttcaatccctgagacccatggtggaagaagagaactgactcaaggtgttctctgactgtctcgtgagtgagtgtagtatcatgtacacacatgcttgcacacatgcatgtacacatatgcacacacacaacatgcataccacacacacatgcacatatacttaaatgcatgcacacatatgcacaccacacatgtatgcacacatatacatgcacacacagacacatacaacaagcacactgataataaataaaataaaaaatgtaaaagatcttgctgggcagagttgagcacactttttaaaaacctttttatcgattctttgtgagtttcgcatactgaaccccagtcctgtttatctccctatcccctcatatctgcccttcactcttgcagtgttccccgcctccaaataaaaaacacatgcatagaaggcatctctttgtggaaactgtaatctgtggcagtgtgtcctgaagtacacccctctgtccacacatccttacttgcaaatgttcattgctatgagtcgttggtgtggttcaaggcatctgttttctgtgacgccatcaatactgggtcctcaccgagacgcctctggttatcttgttgctgccctgtgtcgtggagatcctgcagatttgcatttcacacatctcaacagctcacagatgatatagatttttgggtgggccaattcagagccctggatctgggcctgggtggcagctgagccggttaagtgtggcagctcttccttgtctacactgcaggggtaagctccccagcactgctctccctgggccacctagagccaccatctgcaggagacagagtcagctagctctcttgccctcatgagaacaagatcttcaaatgacctgcaggtctgattcctgtcagtatcaggagacatcaccactcaggtctgtgtccttgctgtgaaaaactccagaatttgtcctcgtcaggctgcctgttcatcatagctgcccctgtggtccagactcaagtcgtagttatagtaagtagtgctttgtgtagggtctgtgtcagtatttgctgtcagcactgccagcccctgcccttctgtttcagagatggaatgttggaggtgaatggcggcctgcttgtagagcagagtagtggtggtggtcagtgcagtgatcatggaaaagatcttgtctctagtcctgaccttactgtgttattctgggcaagtgttcatcttgccgtttggggcccctcttcactcgtgaagtcaaatgcttccaacttcaaaagttacttatgctaatttaaaacacttttcaaattaatatagatcagttgtataaagtatggtttcctttgtatgatttaacattattgttattgttattattattattgttgttgttattattattattgcaggcacatgtgtgccacaatatgccatgtcatttctctggtccgaaataatagttgttttgaaataacctttatacatattcatataacattctttggtcgtagtcactctctagctagctgactttaaacagttatttattatatgtcaagctttcaagtatgtaaagactgcctttcttttcttttttttcttttttttctttttttttggtttttcgagacagggtttctctgtgtaaccctggctgtcctggaactcactttgtagaccaggctggcctcgaactcagaaatccgcctgcctctgcctcccaagtgctgggattaaaggcgtgtgccaccacacccggcttaagactgcctttcttaactgagtaactgaacagttacaagttaattgtgaattatgtctcactttgaaaggtgtcctgtacttagccatcttaagaatagctagcacatttttttcttcctggctaccagacatccattttgccacatttccctctaaaaacaatgttttcccttcattaaaacaaacaaacaaaatcttccgggccatcaagatggtctaacagtaaatgtgcttgctgtgcatagcctacacctgatgactgagttagattcttaaactgactcagagctggaagagaaaggacttcacaaagttgttttctgacatctgcatgggctgcccaatgcacatgtacacacatgtacatacatgtacatggtgtcatacatgcccccatacacccacacaaatgtacatagacacatacatatacatacacagatacacatacagacacacaccacacacacagattgacagatgcacacataccacacacagacagagacacaccacacacacagaggaacatacacacatgtacacacacaaatatatataatatattatatatagagacacatatacaacgatacacacagacaaacacatacacaccacacacacacagatggataaatatacacacacaaatatacatagacacacacatatacatataccagatacacacacacacacacacacaccacacacacaaattgacagatgctcacacaccacacacggacagagacataccacacacacacacacacacacacacacacacacacacacacggagggacatacacacatcacacacacaaatatacacacacacacacacacagatacacagagacagacacacaccacacagacggacacacaaacacacacagatagacacaaacacgcacacacacacacattccttccttagtctaggcttttctaagtagctcctttggagcgtgggtctagattcgtggtgctgtcaaggatttggttgagcaggctttcctcagctaatccctgtatttacccaaatgctttgctggttctcaggaatgtgcagcagccagctctgattaatggtctcagaagtaaacacagcatgctccgaaatcaacagacttagcaagcggcacattcttctttgtttttaacctgtgagtgcccccccccccctgttttcttctgctaatttgtggtgctaaaggctcccatccccagcagtggagcacactgctgtgaagctttgggtggcgagcaaagagatcactctgcagtcgcctccagattgttccagggtctcagtggttctacttacgcactcacacagctcatgagcccaaagagatttcatgatgtcaaggcgggtcagcagctaagtgactatgacagaacctcacctgaaagaggagttggtgttttctggttttatttcagaggtacacaattatggaggcctggctccacccagcattcagctgaggggctggattcctgagtcatgccacagctctggtctgtagtcttggctggacatcagccaggtgggacccctgggattcccttcctgtcctcccaggccctagaactctgtcagcacactggggagattagacaaaaaaaaaaaaaaaaaaaccctcgcagtttgctttcttttcgaacacgttctcataaagaggggcttcagctcaaagaagctccttctttgttcaccacagctgtgtggagtctcaacttgtcctgcacttcctcggagatgtctcgagatccggagtgaacttgctgtggttgcctttgggcatcaaactgtttagcttggctcgattatataataattatataattgcccaatattcttgtcagcaatttgcaggccgtatttttaatagggccatttgcctttctttccatggttccttcaggactggtgtaagctcctggattattgcagcgcagccccacaggccctgcacagatgtgagcagaggtgacgcgcgccctgggctgcctgtggttatttgctccataaaaatcctcctgtaaaccatcttctcagtgctccttatgggtctttgctttagtaagatttctgttggtgttcgttgaaatggtatattctttcagggagatttctctttattaacccgtttaggaaatctaatttttgaagaaaaaaacctggaaacaaactctccagcttattaacccatttaggaaatctaatttttgaagaggaaaaacgggagacaaactctcagtgttgttgtcgagttcttaagcaaacagacatttccatttatctgatggtgagagaaaggcgaggcttccaggggttagctgaagtaaatttcgtggctttcaaataagttttctaacttgtcagcattgctggtaactttgttctcccttgaccttgacttctttctccctgtggcaatacacaaaacttgttgggcaggagctaagaattacatgaatgaccgaccacactccgatcttttcagttatcagcaagaagacctcaaagagaatggggtagtgatcaaaatagctgatattttttgattgatagcgtattatatgtgtggcaccttataaacctgggtgcgcgctctctctctctctctctctctgtgcctctctctgtctctgtctctctttctccctctgcatctctgtctctctctctcacacatacatatatatatttcaactgtctcaaacaaagcaacaacctcccctcccccgatacacatatcagtcacaaatctcagctagatgacggccacacctttaattccagaactcaggggtcagaggcaggtggatctctgtgagtttgtggccagcctgttctacagagtgagtacagacctaccaggactacagtgagaccttgcctcaaacaaaccacactcacacacagacccagacacacacagatccagacacacagagacccactacacacacacacacacacacacacacgtaaagcaacagcaatacaaccttgacagagctctagacaggaaccagaaatggttagaaagaggcttctggatcacatggcccaggactgagtttttctgcaatgtggcagagaggcagcaaagccctttctcctttttaatattggtgaagaggtgaagagttgaaatatgagttttgttctttctgttctttttttgttttttgttgttttttgtttgtttgtttgttttttgtttttttctctctgcagattgactctcagtgcaattgaagttgatcttagtggtaacctcgccatggtgaggctcagtctctaagaactatttctgcttgctggctcttggaactgcatgtccagtgtccctgactgtgtacattgttactgctgatatgacaggtgtctgcctggcgtgtctgtcacggtcctaaaaactccacacagaaccaaagatctacttgagtgtgttggtacattcctgtgatgctagccattcagggaggttgaaacaggagggacttgaacccaagaatgttgggctagcctgggaaacatagtgagaccctgcctcatgtttagtatgtgaagtataagcatgtcacttttaaaactactctctgtaagagtctttgttaacagtcactgtccaccccaatttgcctgagggctgccccggtctttttcaggacaaattgtttctcttcgatacttttcagaaattctccatttaactttttacatatgacatgtgtgttcactagcgaaatttcaacactgttttcttactgaaatttgtttatttttctaggcaagttgaacattgcagagaaggatcttaaggctacacccgacttgccacacttgccatccagctgaagaaccaaaggctgttggagagatggcagtgacatcccaccacatggtccctgtgtttgtcctgatgagcgcctgcctggccaccgcaggtaatgcaccttctcaattgggaggctcttaaccttctcttgaattcctatttccttctcccctcagtctctttggctaaaaatatttagtccatattatcttatgtaaaatgtgaatatttatgttatttaggtaaataaaatatttgactatcatactgatacataatatgttttcctgtgttgtagtttactaagctggggctagacattctaatgtcatgacacgggacccagctaacctctgttgaggtaggcagataacaaagagccccatttgaattttgttacaggcatagttaagagcaaaataagaattgtaagggtctttttattctcttaaaagaatgtttttataaaataaatagatcttttgatatagaggtaacatccttatcgtgagatttggggaagggaggcgtctagtttcagctgcttcggacatattaataagcattctttaagacccagagagagggtctgagaagtaggctgtcagtgccagcttcagcactgaaggagagagagagagcgagagagagagagagagagagagagagtgagagagagagatcgctcgcgagagagagagagagagagagagagagagagagcgcgcttatgtttcccagaggctgtcagaatgtaagggcaacgctttgggggagtgttaggggtatcatcatttaacacatttggaaggttaattcgctctattttatcattgtgtgcacttgttctgtaatgagctatataaaagcaattcattgtatcagttctggaaacgggcagttctcaacaaggacagcaccgacctaaacgtgtactccagccagcctttggtatatatcgtatataaactcgaacaaaatagttccataagctctggtaatcaaagctctgagagaagtgtgccatttagtaggagataaaatgagatatggagatacatagttcatttacacgaagttgtgtagcgggtccagatttttacgttttgcattttgtgtggtgggtggaagataacatctgaccacggaggcttccggaggcagacagggactgtgcagacagactgtgggaaggccagttggtagaaagatgtgtgagactggagatcagaatgctacccccaaccactgtagacattttgaaagaaagttcttaatgttttttattgattctttttttctttccttctttctgttgttgttttaaatgccagtatgtgaacttgaactgcccgctctgtctgtgtggctctctgtcagcagtttcactttgtgtcactgttgaagaattgtttgcctttcagggtatgcaataaaatggatcttttctttctctttcttttctttatttttatttttttgagatagggtccctctatgttgcctaggctatcctggaacacacagagacccacctacctctgccttctgagtagaaggattcaagatctatgccagcgtgctcagcaaaaatgagtcttactgttaaaatggatcaagcggtgggcgagaggaggcacacttgctgtgataaggtgtcgaactgtgcctggggtcttgacacaggggttctgctcttactgatgtcacgtcacggagagcggctccatgggaaagctgtgagcatgacggcttgtgtagccttgatagttttgacagtgaatcactcttgccaaacaccctcctttctctttcagaacataagagggggatgggggagaaagaaaaagaagaaatatatacacttagtctcatatatatccaaagttttgcaaaagtagaaaatacaatagagccacggattttgtagactcacagggcacctggtaggaaagcagaggggcgggtgcctcttctgtttttatgggttgtgagtgtgtgtgtgtgtgtgtgtgtgtgtgtgcatgagcatgcatgtatgagcatgtatgtgtgtatgtaggccagaggacaatccaggtgtctcttttcaggctcggtgcccttttgctgagacaggtctctcagtggcccagaactcaccaagtaggtagattggcaatccaagtgagcccagggcacccatctgactctttttatttttatttttttaaagatttatttatttatttaataaatatgagtacaccaccaatgctctcttcagacacaccagaagagggcaccagaccccattacagacgtttgtgagccaccaccatgtggttgctgggaattgaactcaggacctctggatgagcagtcagtgctcttaaccactgagccatctctccagcccccccacccctgacctgactcttacttgacattggtgagattacagccgagccacactcagcttttaaagtgtgggttctggggacagtctggggattgaactcaggtcatcatgcttgcaagacaaacattttactgactgggtgctaatccgtaggaaggctttttaagtgtagaagttcattagctggtgtcattttgtgcaacccagtaagggcgaatgaatggaggagaaatagttcctgcctgtgccgatgtatgccagcttgcttctctgtccctcaagtttgtcagcggctaaggatgaccttgaactgctgatctttgtgcctctggctttagagtgctgaaattattgacgcgtgtccttatggccaatttatatgatgctggggacctccaacatgttaggcaagcactgactgggccgcataccagcccctttcaatagtgtgtgacatagactcagtttacgtcccaaaatgtttcttggagtattctggctgagttgaacttcaagaagatcataataatgaaaacttatagagtgattactgtatgctaagccccacccttcaatgcttctttttctctttctttctttctttctttctttctttctttctttctttctttctttctttcttcttcgagacagggtttctctgtgtagccctagctgtcctggaactcactctgtagaccaggctggcctcaaactcagaaatctgcctgcctctgcctcccgagtgctgggattaaaggcgtgcgccaccaccgctgccctgcagtgcttcttacatatgacatcatttcatttccagaacaatgtgaatactgtgattacccataattcttaggtgaaggaacagaactgcagaaagactagctgttccttcaagggctacccagctaaggagcagcagttagtggtacatagattactttaagtttggtgactgagcctttttgtttctatattaagagaacgttgagagtatttgcttttgtttggcttccttttgttgctactgttttgaaacagtcttactttgaaactttggctgtcctggaactcactgtattagaccaggcaggcctcaaactcacagagatctgctggtctctgtcacctgagtgctgggattaacggtgtgtaccaagctgccctgcctgaaaggtgcttgagaaagtgatgatgggtttcacttgagcatggactctgtcttctggcgagaagactctctgaaaattttatgggcataaagcaaggctggtttgggagtgaaggaggggagtggactctggggatactgagtttcagagcagagctttggatttcattttgtgctttggtcctgctgttcttcagtcctctgaggtgagaggcataccccgcttaagttatgaatctaagcacctcctaccctcttcctgaagctgagaatacagccagtttccaggcgggagggctgcaggctagtgtgtgtgtgtgtgtgtgtgtgtgtgtgtgtgtgtgtgtgtatccgtacatgagtgcatgtatgtctgtgtgtgtatatgtgtgtgtatgccttgtgtgtgtcagttcctgtgtgtgtgtgttattaagacaacttaacccatgattatcttcaaataagaaaccgagcctcagtttagttaatgacttgtgcaaagtcctgcgacttccgagtgggaaactaggcacttgagcctaggtatttggcagtgaaatgcaggccattgctgccctattggggtgccccaggaggagagcccacatgtggaatgaatgaaactcttagcttgattaagtaccaggtgagtagtgcccgagtggcatgcgcccagagagatataatgaccttggttgtcttcattttcatttcacacaaagaacctcgtggccatatcccaagactgctggagagcaggcaggatgaatgtggtaaaaatggcttgtatgggcttttcatggggcagggcaagcatgcaagacacagcagggtttgtgtgtttaccccatgggctcggtggggcccttctgtagaaatctttcgcgctctgcttgtgttggggaagagcaaggtgaagcaggcaggtggcagccagccatgactcaggttaccaactagtttgaaaaaaaaaaactatctatcctttatcccccaagtctttctctacttggtattacatggcattgtgaaagtgagggctctgctcttgaaagatataccatgtaagaagcagggtgcctttttattagaaattaccacaggctgttgactggccccttattgtacatcctgtgatctaacatcaggaaagcaagaagctcgaaaactaatgcttgtcccataagctcaagtctgctttcactttaaagactactacacatctctaaaaacaatagtggttgttgcttctgaggtctgccagtgaccagcaggactgtgtctcccttgtcctagtaatgaggaaaaggcatgcagagagaatttcgggaaatcagtttggctagaagacagggctttggctgcgtttgctggcaggcatgtgccaggtcaggagaggtctttgaggtgagttctgcaaagcctcccctgttgtggtgccagggccttcttcattcctgannnnnnnnnnnnnnnnnnnnnnnnnnnnnnnnnnnnnnnnnnnnnnnnnnnnnnnnnnnnnnnnnnnnnngtcctcttggaagcttgcccacaacctggacacacatttgtctcatttccatttggatgcacctggaattccaggtgcagtccacgggaagcagagatggttttcatctacactgctttcctgctgagcaagctttgaagtccggtatcctggtgacagacagcaagctgagatactagctgggccaagctggagcttggagagcatctaaactaataattagaccctcccggtagctgccagttttttttcaggatggtgtctgtacctcccatttcattggaacctccagcagcctcagatgcgtaggtcttggtctcttcatttctaaagtgagaatgttggggcttagactgagtgatttcgaaagattgattcagttctcggtccaagtagaactcaaacacagacaacctgtggtaccatgtgttacaatgcccctcccccttaccccccccccccccacacacacacacacggcacctcgcttctcctaactgaagcctgctgctttcctgggcccaagacatagatctgttcatttaatccttacagaaagtgcatgatcttgtcattcaacatttgtcactgctgctgtctttgccatggcctctatggccaatattttaacccatgttacaaatggatcaactatgacaaattcaaggttaaggctagctgactatatgacaccatctcaaacaacaacaacccctaaaaaaaaaaaaaaaaaacctagcaaaaccaagaatactagagtatgctgttccaaagacattgatattcaatttatttttttagttgacaataaagataggtttgtggggtccaatatgacattttaatatataaatattatgtgagtttatattaggagatgtcatatttaatatttgaatcacctctcccttttaaaagcctaattgatctattactgtgtatgggtatacaggccatgattgatgtgtgaaggtcaatggacagcttgtgagatccaggtctttccttccatcctatgctacctggagatagaacttatttcattaggcttggcagcaagtgcctctacccaccgagccatctcgctgggtcctatatttaccacttttgtttgcctgttgtaagaagtagaacttactctcagcaattaaaaaaattaataagtgtgtgtgtgtctgcgtgcgagagcacatgtgtatgtgcacagttcactgtgatctgtagacaactttcagggattggttctcattttctatcaagtgaattctagggatcagactcagattgtctggtcgggcagcaagagcctcagctgcctgggtggagttctctcctggccccgcctcagcatttcatgtccttagtacattatcactgacttacagcctccgtgatactttggagatctcaagccttttcctcccaagactttttatcttttgactgatctctccacagtccccaccccctccatctcagcctcaggcaaccagggtttgattctctgtttctatgtgtttgattctttgaggttctgcgcatgagtgagatcatgcagtatctttcatttcctgtcctgcttatttcacttaacaccctacagttttatctgtgctgtaggtctgaggggatttctttctttgaggctggggggggggggggctgtgtggtcctccactaggtcatgtgcctcattttctttacccatttatcttctaaatgctctagattttgcatcaatgagtcatggatttcagaatggggaacaatcaactatctaacccaaggccaccacaaaacaacaacaacaacaacaacaacaacaacaacaataacaaatacagaaatagccacagcagccaaaaggatcaagggttgggttgcagtcttaaagcttcacaacagagtgagaacaactcctcttgccagccttgaggtcttgggacacaggagttgatttgggttctttagtggttcgaatgagaacaacccccatagactcatatatttggatatttggtcagcagttggtgaagctgtttgggaaggattaggaggtgtggccttgttggaggagctgtgcctttgggaacaggttttgaggtttcaaatgtccacaccattcccagcccctgcctcttgcttgtggctaaggatgtaaggcctcagctccagtagaagatatagaactttcttctataagttgccttggtcttcatagccatagacacataactaggatagcctgtagttatttttgtctttaattctttacttttgtgtttaatatttctttttgatatatagagaaagcctgctgtcagtgaagtaccagccatcatcagagcactaaattttatgtttattctatttttaattgtatttatttggtgtggtgtgtgtgtacatgtgtgtaccacagcatacatgtgtaagtcagaagtctgcttgggggagtccatccatatgggtcttgacaattgagctctggtcatcaggcttggtggcaggttctttgcatgctgaaccatttcactgccctacctatgatggcccatctattccaaagagcaaattagtgtttttgaaaaagagctggagtggctgcagtggtctgcatttgggctgcgttctctgtgatactgtatatgttgcgcgcgctcaactggccaggaagaacgacgctgctacaggatccttctgcacacatttattcagtcctgtttcttctttctccatatatctcccttgtttatatctcccttgtttatatctcccctgtttatatctcccttgtttttatatctcccttgtttatatatctcccttgtttttatatctcccttgtttttatatctcccccgaaccctgggcctctcactccttttatactctctctcatccacgcactgcaggccacgccccctcgccagtcacgaggcttcagctaatcagggcagcaggggcaaatctccaccaaattggattcacctgtatcctggtacacctgcgcagcactcaagatgtttgtgtcttatatgaggaagtcaggtgcaagtcatatgacttagctgcagtctctggcgcctttgggactgccgccacacccgctccccacaattccccctttttttcttttttggcagagagaatgtctgtagatagccccccgcagccatgccccttacccgtccttgggtgacaaacagcattggtttgatccctgtcttaggttggtgacatgcccagggagtcttatcactgactacttctctatcatgccaagccacacctggggagattgtgttttgcttgtggcaggtgcatcaaaaggccaggatgttaattaacctatggccagatcttaattgctgcaagcaagcctcatgggtgaaggtagaggtctgatccccagtgtgcaagcataggggccctacacaaaaccatcccttaggctcatcacccagagaggtcttggccagctcccgtgtcatttttcctgggggaagggaactaggacactgaaccttcatgcaatcagacgtgccttccacaggatgccaacagcaagctatcctctgtgcagtgcttagcctcgcaccccacggcataacgcagcataatttcttttagagcggcaaaccgaatctgaggagattgtcccgcctccactgcagcaaaagcctacgctaccatggcgaaagtgcgggccgcacactctgcacctaacacatgtgccaaacacaaaaaacacacacactataacaagcatacatcccagggctctcatccccgctcatcttccctgaagcaagggatagatagccagaggggctatatctttaaggggaattcagggatcaaaaagcgtggaaaaatttgaatgtcatgtcgagctggtatcggcttctggaataccgaaaggatctctcatctcggctccatcctttgtgcttgtgggatcatccaccacatccacaggggcaactggatcaggagcctcattcttgcagcgtctcatcaatctctccggctcccaaagaggttctgtctggtcctgtggaaacacaaacagaccttctcgcccaagtcaacacctgatctactcgatccccaggggggatggacacaatacctcgtggtgatgagaccataacctcaatcacctgtgtgtccatctggggagtcaatatgagagtcaagttttcactaacttcccctctgttaggcaatgatttccacgcccttataggaatctgattcacctgctcaaacacctgcactggatatcctgtctgttgttgtgcaaatctaccttgatcaagcagcatatctctatcccatgcaaatttagcttgatcagtgaaaataggacatcccagcaaggagaatctatcctctttccagacctccggacagaaggtctgcccatagatggctgccgaggaggcatagggaggaggcgcagaagctaattcgccttcctcttccgcctcagctcttttattttgtcctttctgtccacctgataacactgtgtctcctttctttttcctttttctttttaagcccttttcctcttccgacatactttcttgttgctctgtaaggattttctgacctgtcttgactgcctctcgattcaaacagtaacagagtccatatatcagaacaaacaagaccaaaactatcagacctacccacaaagggtcaatgggagaaaaaagcataactacacagcgaggatctattgatcactacactgaggttatcatagttccttaacttgtccccaaaccgggaaccttaacttgtcccaaagccgggaaccttttgttaccttgtgcctgcttcctggcaactttatgctcacctctattttatccgaggtccttcccaaactcctgggttactttgtgcctacttcctggcaactttatgctcacctctattttatccgaggtgcttcccaaactcctggggtcgcaagtttcactcaccttgaacttaccctgccggcaaccactgactgctgaaagttctgaactcggtgggggagtcggttccccgtacgggccaccaattgtcgcgcccactctcgaccagcaagaacgacgtgaccaccagtccttttaacagcagtttattcagcaaatttcagtcttcctctctcttctttatcagtaccgttccccagctgaagagttctgaatccacgccagatccttctcaacagtctgtttcacgggaacacttcattaccacagttccccgtgatgcagttctgaatcctccctgtagcagggggtcttcgctcatgcctgaagatgtttcttttcccgggttttctcgtcccaggtcttctcgtcccaggtcttctcttcccaggtcttctcgtcccgtcccgagtttttcttcccgggtttcggcaccaactgttgcgcgcgctcaactggccaggaagaacgacgctgctacaggatccttctgcacacatttattcagtcctgtttcttctttctccatatatctcccttgtttatatctcccttgtttatatctcccctgtttatatctcccttgtttttatatctcccttgtttatatatctcccttatttttatatctcccttgtttttatatctcccccgaaccctgggcctctcactccttttatactctctctcatccacgcactgcaggccacgccccctcgccagtcacgaggcttcagctaatcagggcagcaggggcaaatctccaccaaattggattcacctgtatcctggtacacctgcgcagcactcaagatgtttgtgtcttatatgaggaagtcaggtgcaagtcatatgacttagctgcagtctctggcgcctttgggactgccgccacacccgctccccacatgtatacattcacaggcgatgaagtatcactttctctacttcccttttaggttttttgcacagaaacaacacacacacacacacacacacacacacacacatgagtagtcatttctcaaggattcttctgcattgcagtgtgtgtgtgtgtctggtgtgtgtatttgtatatatggggtatgtttgtatagggtgtgttgtgatagctattaaataaaaggatatatctatgtatatacatgtgtgtatgtattttcagggaaatttaccaacagcctttgattcaggtaactagatatatacacagactaggaagggcagatggttaacaggacggtgaatgagattgtccacagatcggatgtcagacccctcagcaaatgcattttttctcttttgcatctgtatcccaggttgtgtaattgctacactgctctggatttctgattatttgaattattttagaattccaatggcaggctgttttatgaagagtgattaaacattctctctaggacacagctatctgtgtattcccagacagctgtataattgctaagtttatagttggccagagttgtgtatacaggaacttagacaactgatccttgatacttcagcagcaatgcatagtgtgtggtgcagcgaatgccacttagcccgcagctggccctgagtcttttcatgtagaagggggactgttcatcattttacattcactttaaacaaaatccactgtgtttttgataagacccatgatcttgtcattagaccaagtaacctgttgtacctcagggttttgcttggcttccaaggcacaatgtggcagggatggggtggggtggggggacgtggggggttgggtccttaggagtcactgcttttgtccctattctttttacctagtaaactgcttacagtgctagtcagttgctgtatttagccagcatttattgagtgcttactgttttcatacactattccaggtgttggaggtagactaggaaaagaaaaaccacatacccaagagtatttgatcttatgaatcatgtctggagcagggagaaacagcagaaacaacagtccagctaaggactaaaaccatccaagtactgcatgcctgtgatccccgacctcatgggtggagggtgggtcacgagtttaaggtcattcttagcaatatgagaccctgtctaaaacaccggaagaaggaggaggaagaggaagaggagaagtaggaggaagagggagaagaaggaaggaggaaaagaagaaaagaagaaatgagaagaagagaagagaatatttcagtttgaaagaacttgcctagattttactagacccagtattttattcctaataccaccccaaaatactgtttttttgtttgtttgttttttgtttttttaaagttggaatttgggccccatgatagactctaggtatacaacgtgcaaggctcatcatacaaaagcacatatatccatccatccatccatccacccacccaccccattcctctcacacaaccacccacccatccatcagttcacccatccacccatgcataccataggtgtgatcaagaaaggcctgactgacttgacctttgtgcagaaaactgaaagaagtgagttaagtggctctctgaagagagagagggagggagaaagagagggagggaggacgggtaaggtcctgagatggaagctggccagtagtactcaggtgttggcaagcagaccatatgtgtgctgggatgggtgagtcagagaactgaccatacagtgaggaaagcttggtgtgtgtgggatatgttcggtgtgtcatgttggggctgtgcatagtggagggccttttaggccctgtgatgactccagtccaggagatggagccatcagagtgctcgagccaaagaatttgatcaagggcattttcttctttttccattttcatatgtgtatgcgagtgtgcacgtgtgtgtgtgtgtgtgtgtgtgtgtcttgcatgtgtgtgtgtgtgagtgtgcaagtggaagccgaagcttgatgtcacgaactgcccacctttgcggtcactcttccaccttgctcagtcaatcaggtctctcaatcaaactcagagctcgctgataggggtagccttgttggccagcttgctcagtgaatcctgtctctaccctcagaggctaggaacaaagatgggcagcagagcccacccaacatttacctgaattctgggcatctaagctacagtttgtgtgcttttgtggttcccctgagcactctgggacactgttctgtggttgtagttactgtgttgagacatggtaggaaccagggtcacttactacaaggatcaacctttgggagtgatctgctcattgaatgggcttgacaattctgtgatgcttgtcagtcaaaggttgcctttgggaagagggaggagttctgatttgagctgatttgcttttctaagcctcatcccaggcagtaaaaggcctgtgaataaccaagtataaccctgaggagcccacagctccaggaggtagtctttctgtgtttgagactgactagggaagtttagaggaatgcttcaatattttctctttcagccccctgctgctcccacccccttcttcaagacttcctctacatatgtttatcttgttggcatatggagcaggctacacttctgggtggccttagatagtgaagactaaaaaaaaaaaaaaaaaaaagaaaacctccccacatttgtgcttatgggaagaaggacatattagattgtgcgggagggagaagagggagggagggacagaagagagagggggaataagagggaggggaaggaagagagaaagagagagagagagaatgaggctgactgaactttaattttgaggggtgagtgtatagaggggatgggaatgtgtgtttctatgggtatgtgccctagaaactatgtcaaacagaaaaacaaacagacaaacaaaaaaccctttcttttgaaagaacagtttgaacttcaggcctgttaatgatataattggagagcagggcctgaccccagcacctactaccttcttggttgataggaacagctctgctgtttgtcacctgttgggtctaagtgtggctctggtgggagccctacaatcctgtctcctgtgtttgccaggcttaattagctctagaggatgctatcaaaggctgtctggcagtggtttgttaatgataggggagagattcaaaagcactaattaattgttagattatttgcaaagcacatgctggaaacccgaagcctgcagagagggttggcagagaggcctgaagagattagccccgaccttcaggctcaattgcctcttggagttgggccaagaggggcatagctgttctttgtggagaagtacacttggccttattcttccctgaatggccaatttgctgttgaggctccagggtgacagaacttctgtggccctggcagaagcagaccgcccaaaggacactcttaggaagttgtgtgtgctttctgtttagtgagagaaatacaatcacttaacattcattaaccaaataaacacttcctgagggcctctcagaacaggcagggagctgcagtttgatcttgaagcagttcaggttcacagtgttaaatgtccaaaagcatcagggttaggcttttaggggtttagaacacttgctgagcgtgcctaaggctctgcccttaatctgctatcttaccaaaaatacctggccccaaacatccatcatgtcaattagcacctccctccccatttaggggagtcagcaaaaaataaaatatttaagtgcccagtgtaaaggaaaatgatgtttaaaactttgaaaaaaacttaaaaacccctaaatttgaaattccgtgtcccagtggaagctcggtgtagaccatacagggggaaaagggaaaagcaggctggtgctttttttcttttgggcagtgcatttagtgtatcttacagaatcgcaatccctagactcagccccatccgtcgtccttgtgtctgccccgtaaagatgagcgggatctgagcctttgccagcgaccaccattttctgtggattctgaggtcagcgttgtagaagaaagcagtaagaatttggtgattatccgagagccaaacgagtgcatgcaaatgagaaagctgctgtagccctgcttaaaaacaggctcagaaatactctaagacccaggtctggccttcactctgcctgacaggctgcagtggctcctccccacccctcagccccaccccaacccccacccccaacctgctcttctaggcttgggcaccggagtaagtagctacaaactccagaccaaatcgcactttattaacaagattcaaaagcaaagaattctaaagagacatttcagagatccatgctgagccatcccatggtactgtcacagcgtcctgaagttgagaaaggcacaagatgtgctacttctgtttattaagcaactcggatccgcaggagagtgttttcatgagcgcctcctggagtgcggtggagtgatgctcacccacggatgcctccttggttactttgaggtcccgtatcctgagaacacgaggacgtgccccagctggcaggccccagggccggactttaacactttctgaaggcccttcctgatagctttatggagtctgatgagacagaagctctcagagctgtcggaatcacgaggaacttcagcttaggagccatctttgggttggtaagtggctaactgctgtgggtgtgtgttgtgtatgggttaaatcaatggcctcacgtgtgctgagcctgcactttggtgtcagctctgtgtccccacctgtttttaagattggtttgtttcagcttcgttacatttttgggttttttatttttttgggtggggggaggggggaagtgatgccagcaggtagcatatcccagctaagctgtgagaggatgctgtgactagcacttgagttttatttattatttttaaagactttaatttagctgccttggaacataaccatgtttatttacatttaagtacataggagtgtgtgtgtgtgtgtgtgggggggggtgtccatgttgagagaggggggggggcaaatggccgagtgttcacagcctgttgtgtttgttctactgttcatgaatatggtacacccatcttactagttttttaaaaaatccttccgtacattgttgttttggtaggtgttttttcctcttcttttcttgtgtgtgtgtatgtgtgttctaggcctttcctccagtgtctcatgcatactaaacactaaacgtgtgccctaccactgagtgagtgaggctccttggccctcagcagttcagacttggaagacatcagtgtgttcacactgaaccatattcctcagacatgtttcttaaacttaggtccagggccctaatttagggctgtaatttcaccctctgtcaagcattcttcattaggaatgatggccattaacactccctatggctagaaggagcatgagttcaggatcaggtaactaaggctggttgctaaggaaggtcgctggtctggatggctttgctctaggttataggaactacagactaagggatacggtgtttagctaaggctcaggactaagcctgctgatggtcacagcatccttgcactgtggttaaaatgagaatccttgatactttggactgtacatcattaggagcagtctcagcatctaaatattgaatgctgcaccctttcgtcaggtcctcagattttcagtgaaatttcgctcactccacagaaggttttgggatttgtgaccaagagatttggtagagatttgccttcggagtgtgagtgtttgaagacttcatcatgctgaacagtgaccctgttaactattattgtacatttattaaaggaggtatttgtggtttgaatgtaaaaacggtgccagcttcgatgctgttagaagggcgaggggctggcatcactggggagtggggcagtgtgttagtccatacgtctgcattaaacaatctccagtttcgtttgtgttgttaatgaagcccagaaacctctagattcatgtgagcagacagctttatgtagagcggagttgtgagctgaagtggtctgtctttcatagaccaccatttccctgaaagaacactgtacagacagtggtcatccaaggcgttgcatgcagttttgacttaagtacagggtgcatcttttactcaaaggcactatttgttgcctgtgataagagtgtatccaatcagaattcattatttggagaatttgcatctgtcaccatggctatgagagtgtcacggtagttagctgcttttctgacaggagtaatggagacgctatgagcacgtgacattaaagatacagcacagcaggatgccttgtctgatgattctgtaagactcagcgaggcgttgctttccaaatgattggtacatggcacatgatgataccattcatctttagagcacaggacagaacagttgattcttaaagcctttatatatatatatatatatatatatatatatatatatatatatatatatatatatatatatatatagttgttgttgttgttttggagacagagtttctctgtgttgccctggctgtcctggaactcactttgtagaccagactggcctcgaactcagaaatccgcctgcctctgcctcccgagtgctgggattagaggcgtgcgccaccacgcccggcttgcagtggattttaatgcatcagagtaggaaaagctcattctgtgactcagaggcagggtttcgggaagccttaaaaatgactgcttgttgatccgagatgcgatatggaagagccccaaggacacggaaagactgttaagatctgcagtttccagtagcttagatggccaaccctctgtgcctgtgggattcacaggcaaagcttcaaccaagcagattggaagtatgtaaagcaaattgcatatataccaaagatatatagacagtccttctccccattatttcccaaataatccaatagacaaactgttcgcacagtattcccatgtgtcaggcactggagtaatctagaggtgatgtaaagtgtacctgagagcattgtctggctgtgctttctcatataagggacttgagcatgtctggtgggggtgggggtgggggtggggtgagggggttcctggaaacaatctcccgaggaaagctagggactcatgactctgtgtgaggccgcatttctccatgtctttcaagcagaataatgcatcataacaaattgaatgcagaagcaggtctgaaacccagctgcctctcattaagctggacattgaagagatttgcaaagatgcagaacagtctaactctgccctctgaatcaagagctgctttagaagttgcttttcctgcacaatgctgtttatgctgagatgcgctgtatctgaggttggctctgaacaatgtagtatgtacttaaatagttcccaggcttagtttctattgttgtaaacatcaatgtatgttatgcatttatatgtgtatatatacgtatgtgtgaacatgtgtgtatgtatatatgatacatatgcatataaatgcatagcatacataagtgttgttcaaggttagaggtaaagagggtagactgcagtataatttatgagacaggaattcaaggggttgttctgagcttgggacctgtaattgatttctttagctacttcccttaaaaagtagaaaatttaatgtagataggattttttttcctacaacgaacaaggaactttgaattattgctgaatgttccagcagtttatagatactacaaatgtaaaagtatctagttttgtagaatttttctgctgtaatgttgtatataagcttatagtaaacagtcacgtttttcacaaatcactttgttcatattttttttaattttattctttttttttaaaagatgtatttatttattatatgtaagtacactgtagctgtcttcagacactccagaagagggcgtcagatcttgttacagatggttgtgagccaccatgtggttgctgggatttgaactccagaccttccggaagagcagtcgagtgctcttacctactgagccatctcaccagccccctgttcataactttttgagatcaaccctaaccatattgtctaggctgtgatcctcctgcttcagcaaaggttaaccaattgcttgtgatgtctatattgaagcaggaagtgtaggttatagatatttataactgcttataatccttaccaaggtagttattttgcttcttaaaaaaaaaagcagaccaagaccaccaagaagataggttaggtggcattagtgcttgtaaatagagaattttgaaaaataagaccagctgtgctgcagaatccaatactttaaaaaccaaattaattatcccaaactttggaactaagtgtattttattttgttctgtattgttctctgacagtttcaggcggatgtactgagtttgggcacttacatcccgttcccctctcaatcctcctccctctgcggccttcctctccaggctctctcttcctcgaattgaactctctgtcttttccttgtgttagactaagaatcctaaaccttggagttagcttttgaggggtcggactgatgctagggatcacacgtagggtctcccacattctaggcaagggctccaccactgagtgacatcctcaagcacactgccctaggcaaggcagcaggacagtgtccgtaagtgtccgtctaaaccagcttttgagcaagagtctgtattccacgtagtagattttgtaatggaaaccgccactgttaaggccagtgccaccatattcaaccatgtgggcatccatattcatggtcatcttcagtcatatttaacagaaacataaatatccagacaccgtgtttgtccacgtttcatgagaaaatatttgtcactgattttgaacccaattctttactttccatgcttatttttatgtgtctgagtgtttttctggcatgtgtgcctatgcaccatgcacactatgtttgtgcctggtgcctgaggagggccagaggagggcatcaggtccccagagattggaattgcagatggttgtgagcagccacaagggtgctgggaattgaacctgggtcctttggaagagcagccagtgtccttaactgctgagcaatctctccagcccttgcaccagattcttttgatgtctaaggtactacttggacctctgatcttggagctaaattaacttactgtgcactggtacaataaagtatgttattagttcaaaacatactgcatatagattagaaatgttgggtgtttttgtatcaaaagaactctattcaacagaccacaagttttatttagtattttagaatatgtatgtgatccagtctaaagagaagattctgcttgcccccagtaagagaagttaactgagcacaatgctttcagaattgacttagagtcacatgtccagatgcacacatagctcttccatgaaatggccttgtgaccttgttcagtgttcttgccaataaaatgaaggtggtagcagtatctgtctcattgaattgttttgaagatttaataatatggtgcttttatgtacaaacccctacctgccatttactatattctgttaagcccatcaggactggtgaggttttatcaatcatttgtggcttcttttctcgtgacatcacaaagttttctgatgggtgtgtgcatccgtgcacacacaggcctgaagttaaccccaagggtcttttctcacactgtccatgttttattgttgttgttgttgtttccttgagatggggcggggggggggggggcggtgtctctcactcactgggcccagagctctctggttaggctgggctgactggctagtcagttcaagggaatcctcttgtctctgcttctctgtttctctaagaacaagaattgtgtgtgtgcaccgcaatgccatgctcttttgtaggcacaaagcaaacttaggttcagtgcatagcacagatcttacccactgatgcatctcctcaaccccgatattagaacttttatctcattagcaggattatcatctagtaagtcagacctggaaatatttatgttcataaggcatcatagcatcatagaattctagtaatgacatttgacatttaacattttaaagagtctttattttgtccagctcagtctgaaattatgcaaattatctctctaacgcccattaatggaaattctcagcctttgattaagtttaaacaagaaatctcctggctcatgaaattctttcttgtattgtcccgaaacctccactcttagctctgtatctgccctgctgagctacaatgggccacagttaatgaaaacccatctcaacgctggtggtgagctaatgagttctggacagttagatactacctaaaagtgacagcattcttgccttaatttagcaaaaaaggatttttctttctagtgatagaataactaaagctcacgtttgcagcttgagctgtcctgaaccagttggaaatacgatggcataaggactttcttctgtagcctggaaggttgtaagctagaaggtatggttagtgctctgatctctagacacctcttcccaaaacaccccctgaatggctgtcctttcccaggtaaaggggtgaactttcagtatgatggtcacaagttagggaggaagggtctatttgggcttgtagcctcagagcactcgtctcttggttgcttggtgcagaagtgtgtagaggaagaagtctttcacttcatggaagatagaaagtaaggagccaggccaaaagaggtcagggccaagatttccccaaagattcatcccagtgacaaacttctagctaaggccccttccccaagttcctagaagctgcctaaatagtaccactctgcaatgagcaagcacttgaaaaatgagtctaagagggtccatttatattcaaattctagtcctgggatgcttttggctttaaaattcaactttgtgtgtttggcctctgtctttgtgtcctcctgatggtggaagctctgtgatggtaaagatggagctgccttctgttaacaggttgattgaggtcctttgcaacaggcaagagctgttggcctggagcttgctgtgtagatcagactggtctccaacttgtggctatcctcctgcctctgtctctcaggtgcttggattataggtgtacactaccacacctagtttgaaatggcttatcttatgcagctaccagaacttggcctacaattcagtattgaaatgatggcattacaggtcatctctagatctccagggtgaaccctgctcttcacttagcacaagaaaatatacactgtcctctcttgtgtgtcatggccaatcagctcttcaggctggaaatggaagggaacccctcagagaggagcgtgaaagatctcaggagacgtatctataattatatgcaactttcagggaaaaggcattctttttaaatttttcttctcttttctgcatgaggctttcctagagagagagggttctaatcttatcagaagcaggagtatgctgtgctatcagtaggctattctattgggccagtctggtaatagctttccattatagccctggccaaggactacactgaacccagcttgactttctctgagaatgaaacaagaaacagcaccatcaaaacatcacaatgtagaagaaaactgtagtgaaatttctatcatcttatgatctcacacttactggggctttaaacattttcttatgtaatttgcaaagaccacctgattgcataaaacatatgtgaaactatgaagtgacaggtgttgcgatcctgagctggtaactagggaactgtgggtccctttcctttaggtgtctgtgtctgcctaccacactagtagctactcgttccatagggtgaggacatgtttgggtcagggctcactggctcagtccagggactaactggatcattttctccaagagaagcccctttggttttgtatcctgggagacagcttgccttatctgtcaggtttcacacttgcttgcagcctgccttggcttcagcgtttgactcagtagcctgatggctttgagtgagttagtataattcagtttccactttctttaacccgattgtgtatctcagggtggttgtgaggaataatcatacaataccacataaagggcttaggagaggccctggcacagtaatgctgcaggagacaggactgccgttgtcattttggatgttttgagcaggatagtggaaaagagaaaaaaggatattagaaagcttaatgtccttacatagactcaaaggactatgcttatactactgagggacactgtgtttccatgtgtgcttcttatggagtgagacagtggtgccctcttagccacaaactaggaaagaatgctttgagaagtttaaatttactagttagaaaataaaatgatggatctaccttccttccttccttccttccttcnnnnnnnnnnnnnnnnnnnnnnnnnnnnnnnnnnnnnnnnnnnnnnnnnnnnnnnnnnnnnnnnnnnnnnnnnnnnnnnnnnnnnnnnnnnnnnnnnnnnnnnnnnnnnnnnnnnnnnnnnnnnnnnnnnnnnnnnnnnnnnntttccccaaccccccttcttccctttctctttcagtccctgcttccctccccctttccctccctcaccttccctttctcccttcctccttctattcctcccatcttatgtagctgaagctgatctttttttttcaaggtcggattatttatttgttactcttttgttactctcccctcctttttattagatattatttgttactcttaaagacttacttttgactggactcagacttggaagtagaagctctcagcaaggagagcctacatctcttggcaatctgttcctggcgcttttctttggcttccctctttctcttggccaaaagtttagcatattctgcagcctcctccttgtttttcttagtgcattgtttcttcagagcaatacatcggcatttgtgttataggacacgtggagtaagaagatgctgaatcttgggtgctttggtcctgggcttcttcccttctttgtttaagggctttctgacaacatattggcagagatcgtcttctttgaagagattaaaaagcttttggattctactagctcttttaggtcccaaccgaggaggcacagtagtatctgtcagtctaggagtatccttttctcctttctttacaataaccaagtcggaacacttagattagcatccacaatgcatctgcaagcagacttgtgcttcctctctccagttctccttggtctgtaacagggatgccccttactcaacagcaggtgcactctgccatgggtcaaaatgccttgcttcatgggaaaaccttgtttatcatcccaccactgatccggaccacacaacccttccactcttcaccaagagcatcagcagctacttcttcggccatgcacttctcatagaccgtgcaaagcttgcaatcatctacttcagtgagtttctgacagccggtggcagggaaggagatactcagcttcatcttggtcgaggctgattttgaactcctgaccctccatcttccactccctgagtgtgcaccaccactccaggctgactttgagtttctccactttattggggggtggggtgactaaggatttaatccagagccttatgctccaccattagccacactcttagccctaactttgagttttctaagctgttcttgtacttggagttttagctgttgaatttcttgcatcagggggtcttagaaaaaagtgctctttctttatttggcttaacaacactcatatgcaaagtacaaagggaggtagacaaggtaggaagaaagggcatatgtgctttatgttttcattatttacgtttttaattgttaaactttatcataaattgcaaattaaaaaatattaaaattaaccagacccaaagacgatacagctgttcactttagcaaagactcggaatcaacacgtgggtagtgaaaatctggagtatacttaaatggaatactattcagctctaaaacttgtaggaaaatggatggacttagaatgtaaaatattaaacaagattatacgttccctggaagaaaaaaaacccaagtgttcttcctcatatctggaatctagccaagaatatatgtatatacaaaaaacaaacgtgtgtgtgtgtgtgtgtgtgtgtgtgtgtgtgtgtgatgggttgcctagacaagagaaaaacaagagagcaagagactaagcgttggggtgaggaagggctgcacacaggtaatgggcaggagttagggaaaaggatagaacggcaattgtctttccagttataatgctgtcgtgaatgtttcgttcttggtgatggataaatgaattaaatatatccagtagtgaaagtataaagcccagcaaaatccccacagcttccacaccaaacacctcctctaagtccgcacgcgtgcctgacactgtgtgctgatgaaaacccaggcatcttgtcttatggctttgtccccaaccagagggagcagatttgaacatgccatggaccagcccctgcccagagtctgccctcccttccctgttaaaattaattggccattacatttaataggactttaaacagaggtaattaattgtgactactattttgatgttcagtaggggaaggaagcattactttatgtgagcagaggctaacagggagtctttgaagtctgcccaggagcaaacgtcttaactatttggttttcctccagcttacaataaaaatctaagggcaagaatttcaagaattccaggatttgaacatttaatcctgtttgcaaagcaggttctgcccagggttccaagcttatgagttactaggatgaattagagggttctcggctttataatgatctgattgggtctttcggtaaagacagaaattgatgtttttgagaaaggcaggtcttaatttcacttatcttttaaatggccatgtttctgagtatggtaccagtgtagtgtgtgtgtgtgtgaagtgtgtgtagtgtgtgtagtgtgtgtgtgttggagatactcttactatctgtagtctagggtagcctcagactcactacatagtccaggctagccttgaactctaggtaatcgccttgttccaggaagtgctgaattcccaagtgctgtaattacaaatgtgagccacatactcagctaattttattatatatatgtttttcaaatgaaggtgggtcacaaagacagccaagtggggtttatgttcacaacatcccgtagcttctatgggccccagtcagggtgatttgattttactcaaaagaagaggcttgatttttaaagaagtcttgtgtgtgtttgtatgtgtgtgtgtgtatagatatatgcatgtttatgggtatatatgcattggaaggccagaggtagatggccgctcttgttctaccactctctacattgtatatttagacaggcctgtccagtgagcccagagctttcaggttgggttagtctagctagacagcttgcttcagggatgttctgccttggacctttgagtgggattacaggtaggctgccacacacccatctggcacttgtgtgggtgccgtggctccaaattctggctcttgcacagcacatgttttacccaccttggccttagtgattcaacctctatagtagtttttcttagaaagcctgtttctagaggacaggagctgcattctgcgagtaggaggctaacaactcctgacttttacaggtggacattcccagggcacttggacaggctgcaggtgctgtgcctatcacacactcgtgcgcattcacaggcctagcagatcctttgaacaaagttgccttgggaaggtggaaagagtaatagtggcttcttgcctgtaagccttggggttccaggccagtttttcctgctgggtagaaagaatggtgagcttcctgctgtgggctgggaggatgggttctgcctcacccgggacagggaagggcatatggcatgcatgtatagtgagggcacggccactccagggtgtggttgaggagctctttattgtagacatgagggagactacactcaggagcatctggaaaggtccagatcagggaagagagtagtccactgaacatggccagcagagacagccatgagaggagagaaaggcagagagcgagagaagaagagatgaccgagagaggaccaagagagagggtgtcaagagagaagggcccaagatagagaggagcccaagagagaaggaaccaggagagagggtcccaagaaagaggggatcaagagagatggagggccaagagatgaccaagagggggccaagagatttccttgctgaaatagcaggattatctaggaatcagaagctggggaagggaagtctatgaaatggaggagtttagggtggggtggggtgagaagtgctcacaggtactgagtgagcctgggcgcccacatgtgctttggtatgctaacgggcactacagttagccatttgtcctaagtttcttttggacctgacaatacacagtgtctctggcccagggccagtttcacctctccaagatctcttctgtcctggggactgctcaaatcccagagaggaagtttcctctcttctcatgccctttactcttcctgagcctccaggacaagacctgtcagaggggcaaaatcctgtttgcctgtcacagccgctctgcagccctcagggtcggctcctggatgaagtaggagatcctgttgatcactgtgcacagatgcagagaaacagaccttagggcccaaggaaagctcagagtgacctctgctattaggcagctgcgcccgacaccagtcgctgtggtaactgggctctgtttacaaaaatgaataagcacttcaagcctagggcatccacaccatggacagcctgccagattgccaaggctaaaccaaaacaaagacaaaccaaacaaaagtagcctggaagtattctgtcccccatggggggcatacacaaggccccagaatgctggcatccttcgtcactggacagaacatcccagggtgagcttatcttggttatgtcagagaaagacagaggccaagactggggcccctgtgtggtgctgcatgggcctagcttctcggcagtgagtttagatgcaagtagttgttagtactacagattcaaattcttgaaattgtcttttaaattatgtctttaaagaatatttattttagagtgtgtgtgtgtgtgtgtgtgtgtgcgtgcgcctctctgggggcatctgattttctgattttctggagctggagttacagccggttgtgagccatctgacatggatgatggggactaaactgaactctggtcctctgaaagaagagcaagtgtgctcttaacctctccagcgcctggttatgtcctttggtaaactatggagctgcatttgagtctgcagctgtgttaggaacagctgggtttgggggttatcctccctgagttcttctttttatgaggaacaatggtctgttgcttgcaaagaactggttgtttggctttcccttatagaaaggctactgacatctatgagtctactgtgaagcttggcgcttcttctggcctgtgctctgggtgtttctgcattctcaggtttcctgattccatagccgttgcctttcagtctggtgtgtctctctgcatttgctatacccatgaagtcatgaaggccctcagctgctcaccctgctctgtagacatcaagaagttgagggagaaaagaggagagagcctggaggtggggtgtgccgtcagctgcaatgacactgatgggaactggctttaaccagagctccttctcagaacaattcaggtccacctttgccccctcagcccttcatttcccaacaggctgtgagccctggggcccagccagctgttgtgggaccagagcactgtctcgaaggtatctcgcccttcaggccaatgcagttcctgtggcagttgctattgtttgctcctgatagttcatcgtgtggtctcctgtcgatcaactgaaccagatcagctttagttttcctttaaccaacgatttcagttaaagcctaacctcaaacatcctgctgatttccatgatcacagccccaggcctgcacacaaggccgtgaattcagcgccaaagcccttatggcagattctctttccttcagctcgctaatgaggccaaaatactgatggagaggtggggaggtcagttggtcatatttggggattcatcatgcggggtgagacttggtgctggcaaatctagtaatttatgtatttagtctctgtgtatgtgcatacacacgcatgcatgttcatgtgtgtgtggctgcactactctgtgtgtacacatgctgggagagggcagaggataacctgagccttatgtctcagacactttgtactttttgtctgtgacagggtctctcattgacctgggacttcaccaactagatcaggccagctggccagcaagtcccacatatttctatcccatcttaccaatgatgggatttcaagtgctctttctccaccatgcctggtttttcacttggattctggggatctgaactcaagacctcatgagtgcaaagcaagtactttatctactgagccatctcccagtctcgaagctagtgcttcataccaagaaattgtaaagtaggggaaacagccctagactcttccagggttatcctgtcactgtcagagtcccaggcgctgttgccttaggagtgaggaagaggcttgttcaagggtgccctggctgcgctgtcagattccctagggtggttcaagctagcagcaggatgctattctggacagtgcagccaaccgtctctctggcatctgtcagccagtaggcatgttaataacaagtcagtcggagagaagcctgcactggtcatagctaccttgccttctgaatgtgggtcagagagactgaatagatacattcattcagtgatcagggagtggcagcacctttacccaaacagggtgattttcagctttttgatgacacacgctgttattgttgtaaataggactggctgaaaatgtgcccctgggagttaaggctttgctctcttctctaccacagatcctgtctccctgtatctctgatcattctgtaagtatctgttaagggccagagacatacacagatgcataggaaggagagggtaactgggggtcctcctttgtgtctcctccttaccagtctttggcactgtccatcaaggacaggaaatagccatcggttcctttggtaagagcagtttttagacaggtttggaagaggaaatgaaaactgttgaaaaacaggagatctgcggacaactgctagagtcttcttagtcctgtttcctgggaactctttcccagttaccactgaaaatggtggttttttaagtttaactagcttgtaggtgacgcatgctgggaatagaagccagaaccatcccatgctataaactaccagcctgggtgtgtctgccctggttctgtgcctctggttgctgtgatttgaaacttcaaatgctaactgtgtgcctagcactacacctcacacctccaaggccacccaggaccttcctctatggtggtatagggtatggtggagggggagggacagaagctttgctttggtaaggcctggtgtttgcttgaacccacaagtggactgcaggtctgtggggaatctgaaatactaacttccagccatgctgtgtacaaaatgaaaccagaaaacaacgaggcgtgtgtagagcaaaaaggactgaaagtgactggaaagatggctcagcaggtaaagcaaccgacctctgtgcaagcctggtacccgagtttggccccagatcccacatgaaggtgtaaagggagcactggagccatagtgtcccctgattgccagctatgcatgtacacacacatgcaatagtgaaggataaaagagagagaggctgaggataaggctctgtgggaaagtacgtgctgtgcaaatgtgagaacccgagttcagatcgctagtacctcgggagatgcccggtgggtgtggtggcccagtgcttgggaggttgaggcaggacccttggagcaggaggctagctggactagttgaatcagaaagccctgggttcgagacaaaggccttgcctcaacatataaagcaagagtcacaagggaagacagctgacctcacctccacgttcacatccacatccatacgtgtgcatgcacacttacacacgtgtgaaaaaggaggaactgggcatcctggcagatggagaggaagaggcaggaggattgctgcaagtttgaggccagcctttcatttctctggtactcattttcttaaactacagttgagatttccttttgttttcctgcaccagagagagagagagagagagagagagagagagagagagagagagagtatcatgcttgtaatccaggcctgcagatggctggcagctgtatgcctcagcgtttggaaataaaaggaattttagcccttcatgaaaggtagacattgaaaaactctttctctgctacgattcttatcttccctttttggattcccagcacaaggaagtcatttgctacaacaaggatttgtggaaacacattcattcaaatacaaaaagagaaaaacttgactagtgtgtcaagcaagccttccctgtgacagtgctggaatacgagtttacatgccacagtttaaagtttaaatcattagcgacaagctcattgcagccactggtgagtgtgtatttactgcaaaggcccgagagatctaagctcacggcagcacacatccccctggttatcagtaccatcctcatggctgagctggggccctcgttccagaaaacatacttcctttcgtgttggaaataatccgcatttattttgaccttcagaggactcgtggccttgctggaggacatgagccaaaatttatcctggcaaggccagagctgttggaggcttgtctccacagggattgcatagagtgagccgttagaggcagcaggaggaaggtggctgaggtcaaacagacattcctgaactttccggcctgaaaattaaaggggtacttaagaaaagcagtatttgcagcccctctctctgtgtctgtctctccatctctgtttctctctgtgtgtctgtgtctctccatctctgtctctctgtctctgtctctctgtctgcctctctatctctgtctttctgtttctccgtgtctctgtctttctgtctctgtctctctgtctctctctcacccctccccttcccaccccagagttcctgtttgtctgactttgccaaggttagagtgttctttgtagctgaccttggtaggaagaggacatcgaatctcatttgtcactgtggattaatgcctgtaattctctaaagtttgtcaagtgcagatctcagaagatggatcacatgacttttgagcagtattccttggttgtaaaaatgttgttagctgaggatgcagcttatgccagtctttgcctagcgtgtgtgcaaggtcccagttggggagatattttaatccatcaggtgctgttgcgtaagcacaagtcctcaagttccgtttccagaatccatgtggaaagtcaggcatgatgtgcatgcttgttccctgtccccatgctggggagacagacacaggtagattcctggggctcactggcctgacagcctagcccgatggtgagcccatggtcccaaagagacattctgtctcaaaaaacgaaacaaagcaaaccaaaccaataacaacaaaaccccaaacaagatgaatggctcctgaggaataatatccaggtttgacccctggtctctcttctcatgcacacatatatgcatacattcacacacacacacatcccccaagtttgatccccaacatgggcaaaatatgaataaatgaataagcccttataaaagtaccgtcagactgttaggtggctggagatgactgtcatggtgtcttccctccaacctcacctcagctgagacagcgaccaaagcgcaaggcagaattcaaaggactgctcttactgcaaagccaatgtgctaactagaggctgcgtggcgagtgtgagaatccttagctagaccagagtctcttgtgacgctgaaccacagttagcatctgttatatttctagctgttttagaaacaggagatgctgaggcgctagataaatcacacgtggtaacattaagacatttgttttactaagaatatccattatgtgagaacaattaaaaatgatcattttagagtcaagctctcagtttgatttgggggaggggtaagtattttatatcatacttacatgaagaatatggatactgatggtcttaaatacttcatgtcactgttgatgtttactgtgccggtgaagagtttcatctgagcccagtaaatgggaaccacattctgtaatgattttcagaacataaggtgaaagaggttccataaaatactcaggtgggctgagtgatgagatgaacatctgctagggctgggacgatagctcagtggtagagtgtttccctcgcattcacaaggccctgggtacaatactcagtacaaccaaaaaggaaaaataatagggagatagataaatagatagatagatagatagatagatagatagatagatagaagatgatcatttaatccaggacaaaggattctgaccttatagctgtgtgccagccaccttggttgtctgtgtgttttcttaactacacaggaagaatgttaacaagtctaggtataaaagaatacactatgcaatgtgtgttcagcccaacttcatgcccagtgcaggtgagagggcaggatgataagagtctgcaggcgagagctagagaggtgatccccggaacccacagaaggactgttccatcactcagaggcaggagcagatccctggggcaagctggctagaaggttagctgtagagctctgggcgcaacccaaccgaaagaccctgtctcaatgaacaccgtgaacaatcaaggaagacttccgtgtcaatcttgggactccacattcatatgtgcatgtgcacatgtgtgccccacatgtgtgactacacatacattatgcatgcatgatacacatatatgcatgtccagtgcatgcacacacacacacacacacacacacacacacacaaacagaggaagaagtttgcaggactggttatgtgtagggaaaataagaaagaaagaaagaaagaaagaaagaaagaaagaaagaaagaaagaaagaaagaaggaaggaaggaaggaaggaaggaaggaaggaaggaaggaaggaaagaaggaaaaggaggaaggaagaaaggaagaagagaaagaaagaaggaaggaaagaaagagaagaaagaaagatagatgtgtgttttgataatctttgtcaagtgttttttcaaagactggcctcagatttaaagcattatccagatgtagtctttggcctccggtagtcttctgataggaactcggcctggagctgaacttggacacagcctgttttctcttctgtttaattactaagtgtccagtctgcctctctttgttatttctcttcttgcccttctgttgctttcttcaggggctgctgtttattctggaatgcaggacacccacatttagaattagggtttgtgtgcctcgatcctaaccaggaatggggaaaatgtgatctgatgttttaatctacaagttttagtagactcagaagggttctaatccacagctatgtgctcagaattccaacctgtaaagcctgcgggttcactggttagtgataatgcaccaacctcgctcttccaggctcaggctgtggaggctgctcactgtgtcttcattggcttcttctttattgtgttcaagaggaatctttctttgcttgccagcatcggtctatatgccattaaaatctaaattgttttctgtttttgtttgtttcttcagtgctgggatcaaaccagaacctcatacaagttggacagatgttttctgtttagtgccaaagttcagatttcttactgggcaagtctaactcattaatattttacagatatctcctgcccaaatttatagaattttttttgatgcctgttgcttttgttcatttttggtaagacaggcaatatttgctccaggtgaaactcaggtaaaggaaaccagggcaggcagcttggacgcctcagatctaagccagagtctccagactgccaagatcagtgtttcctgttggttctcactgtaaattgtggccttttcttttggagagtgggatagggtggaagaagaaatgagatactttccaactgaatttccatatattggtaatatatctttatttgtgtagaactttccagtttaattatgaaaaacttttaagtccaactcttaatagtttttataccttcccttgggggtagcgaagacaaaaattatccctgtgtttaaaaagaaaagacaggtcttggaatgtcttcagtagttagagtactggcctagtacacacaaagccctgggcttaatccccagcaccgtataattgtgcctatcagcatgtcacaggctgtgtgttcaaaaccatctgcctttagtttgttaatagtatagtagaagttcgtagggctgggtgtgctagcgataaactcggtaagaacccactttagggtggaggaggggtggaaggtagaaggctatgctgtagatcaaggcctgatactgctcatttctctatgtgtctagttcataggctgactagttcagtataataatgcattacatagaaaagaaaacgtaagtctgttgtggcttccagacagttttaatgttttttggaaaatctctcacttatcgtctttaatattccaaagctttattgtgactcgctttagctgtacagtaatagaagaggagaccttgttgcgtgggagggggagatggctcagcagttcagagcacttactatcctcgaagaggacttgggtacagtttctagcacccacaacccctgtagctccagttccagggactctgacactctgtctgacctctgtgggtacagcatgcatgcgctacatataatgcctgaagacaaacatgcatacagataatgaaagaaattttaaagagaattcccccttgaagactccatgaagaaatctggagaattatacctttgcagcacgtacatattaatttttttctaaacattgagatttgtttcatagttgtgagcagggcagtgttctgaatgagagagggcaaaatgtaaggagttaaaaaagcatagttaatttttccctctctttgctcaaacatgtagttttaccataaactactgacagtttcctgttctggcttgatttaaaaaaaaaaaaaaaacaaaacaaaaaccctacacttccattcattgtttccacgtgacttcctatgccttttatagtagagaagattgaaatctaggataaattacgagttatctttggaggcagagggactctttattatttcagaaaggagcttgacaagtctacctatgtgtgcatgatgcctgtctttatgcaaaggtttgcagagagtgcagtcagaccattattgggaatgcttgctgacccacactgtgtttgttaaacgttacgttgtgattgcgccagagaagggttttccgaatgacaacattctgtgttgtcttggactgaatcacccatgatggccatttgtatagtactggctgagggtctctgatggtgccttctcgccctgatttgagtgaaggcaggaaggagttgtgactctaaattctttggtggagccattgaggagtgattcccacctggtgctagaattgctgttaatctggcgtgtctgtcacttttgcagcacacaaatcgacttgagcaaggactggttagtgtggctctgttcagagcacagttcatcgaagtgggaaaatcacggcagcaggggctctaggccactgctcacacttctggacatgctgcatgtccagaagcggcaaagagatggatgctggtgctctgcttactctctcctttgtactcagttcagaatatcatagaatggtggcatccacagtcaggatgggccttccctatcagttaacacgatatagaatctcccttgcagacatgcccagaggtttgtctcctgagtggctctaaatcctgtcaggttgataagcaaaactaaccgtgctgggatgtgcaggctctgcactctctttattctaacagggattcattcgggggagaaaaccatgagaagctggggatggggcaaccacaggaacttatcagacctacttatccatttaggattttttgttttgttttgtttttccttttagagtttctaaaatacttgaaggtctctgagcagtagaagcttgaatggacttttaatagagctttgctgtgaactaaactcccaacagttcaccttactgtatgattcttgctttctttggctttttattcaaaataggcaactgtgggcctgggattcttactattatctaatattgttttactgtgtcagttttgtttgttttttgcatcctgaaggaacccacaatgttttaatgacttgcaaggaaatcagatgtcacaaatccacatgggccattgtgtaaatggggcagggagctccacccagcccttgctagggtggatcgacttaaaattgaatgtaagtataaatgttaaagtgacaggcttgaagatggacacaggcctatatccagagggagaaagcccttcaggtgtgctcagagtccaggcagaactagtaagtgtacaagtggggccattgtagtagagatgcaaactgaaatatcagggctgactcagggagtaaaagctttgcaggcccggggcctggggccgatttctggaactcatggtagaagaagagtaatgtgcttgtgcacacacatacacacatgcacacatacacacatgcacacaaacacacatgcacacatacacacatgcctgagcacacacatacacacatgcctgagcacacacatacacacatgcctgagcacacacacaaaataaataaaaatgccaaaacaaagggatgaagagatggctctgtggttaataggacctacatttggatgtccaaataggacccccatggttgtttgcaactgcctgtaacttcagtttcaggggatctgacaccctctattggcctgcttgggcactgcacacatgtggtatacatacagacatataggcaagcactcatacacagaagataaaaataaatattaaaaaaaaaacctaaagtagcatgccaacccttaataaactataattagtgtttataatgataaccttaaatgaattcaggaaaaaatacaataagtcattttcagaatgctcaaaatatttaagctggccaaaaagcaattatgcattagtatgtgttaggtaattttccatttaaaaacatgaccaaagttacattagtaaagttcagtttggtggggttttgctaatgtgtaacatggtgggaagtatttcagatatgaaatactgagagaagaaatcaataatatttcaaatcatagatattaccttaatctcattttctgttcagatcttacaaacaaaacccttttgtggtagggtttggtgtgcaaagcatttttgtttttaggtcggaccatttgaaagtctgcatgtgagaaaatgtgggttcccgctggcagagtcagtgacttccctccttcactcgggaggaaaagaagccgcttgatccagagtggaaaaacactgaagaaaaatcccccccaaataacacccacagattttagaaaaacagaaattgctttgactgatgtgacacacttaaaaatatatccagaagcacggctccagcgttgatgcagcaaggcaaccggtcttgaaaaggtgctttgtgcgccaccgggcatgtaacccactgtgcggtgtccccatgagcatgctcagtagctgccttgtgggacaggtatcccatttacctcgtgtttaaatttgggggaagatttttattaaacaacaagacaataatttctgtaaaatgactccccaaagccactcctcctttgtagagtgactatcaggtctcttacatttaaatctaggaaaaatatttccctggcctaagagcatgtttgtttccttttgacgggatccatgcaaccgtcatatttttaggtgatcttggttaatggttcgttgctgggtttgatttctttagacggattcttaacaagatttctatcttgccagcatgactttgaattgattgcagctgacgtgggctttcttggatttgttgttgttattgttctgagttctttgatttctttcgtagaaataagtatacgagcaataagagaatatgtaaaagatcaggaattttctagcagtgaaacttaaggcccccgtttagactagtattgatacatgacctttgagggtcttggatgaaagccatgcggttgatgtctgaaaaataggaaggtttggaagggtcttttcaactcatgcatagaagtccttaaaacccatggggcagcagtcaggacactaaacagcatccagggtccattaagctctcctgccccattgctgctgccgcagagggagactcagctgagttaggaagaagttttcctttgggaagatgttgggaagtacgaaaatgataattacaaccatgttgtagctgaagtttgttctaggagcagtcccattagcagcatccccttgtgtggatagagatatgttacaggatggttaagtaactgcctgaggccatagcactaaagcgtggcaggactgaggtttaaatccaagagagaaacatagaagcagctcggggcttggttattctgttgatggagtcatcattcagtgagtctttaaaaactcctgctgcatgtcaggcatggcaccagcaatgcagtggacagtaagcagagagcatggctcttgccatcgcggggtttcggctgagagagtcaggagagagacagagaggagagagagacagaggcagaaagagacagggtcttactatgtagctctgatagttctgatcagtctgtgttctaactccagagatccacctgtctctctctgcctcttgagtgctgggatcaaaggagtgtgctaccacgcccagctcaaacaatagatttctaagggctgacctttgctataaaagaagtctctgatgatagtttaacaggtttaaatgtaacagggcatcaaacatgcttcaggaccagcattagtgatctgggaacagccctgctatatttctgaggtcattgatacacatatagtttgatacacattgatacacatgaagttctgtgactcctgatgagcccagagcttccatgagctgcaggaattacatctcctacagagccataatcaccccctgaatgcagcaagtctctgtgacatacgtgtgttcacaagattcccttcaaaccactagctgtcagcttccatgtatagaagcacctaagcagggagctagtgagaggaagaagtccaggttggtcttataacggggtctgatgcacatcaaactgggtaattttctgttaatggtgagcatctccttcagttgttgaaaaccagttgctgagtgccctgattgcatagaaaagccttcaagcaaacgtgttgcagtttatggcttgcctttttgcacatggatctaaccagtaataggtcacgtggccaatgcaaaagttggtagattctttttctttttaaatctttctctcatctgtagtcaggacccatggttttaggtgatgacccaagtgtttccctcgtccatccttcctgcccctcctcccgtatcatcttatgccacttgtgccttgcccatggtgtgacagagtgcttcctcagcctgagtggtcctgctgtgtgccacacctcagagctccgtgtataactcttcctgtttcttgcttcctcttttttttttttttttttataatcagatttaaaaagagaaagatggaggctagggctatagctcagtgcctatacaaagccttagattcaacccccagtacccacgtgggagggaaataactagtttggtgattattgtgggtataagtcaaggtcttcgtggtgaacagatctgggactgtcacggtagtcaacgggacaaccctgtgccccttgaagtctcattttgccctcgtagggaatgggttacaaattttgttacgtgaatgactggcgattgatattataagtttagagcaattaaatatttttgtcttaacaaaaattgtattttctttgagtcattttgtattctgaagtcaagacggggagtgggggaagaaatccgtttttcttttctttcttttcctcctttcttttcttttccttggactttaaatcttaaattttaaatattatcactagtgtgcatatgtgggggtggggaagggtttgagggtccacatgcaccgtggcacgtggcagcttgcagcacctgcttctctccttccacagagtgtcccggggattgaccccaagtcatcaggcctgtggggtagacacctcctgacacgactgcagccagagaatctgtcagttatgttagcttcttatctcttaagtgaaagctgcaggctctgtccccttccacctctgcgtcctttaagttaggagaacaggagtgtgtgtgccctcctttgagtgggaaatggaccaaagcttggctgagctggagctgagctaaccagagtcctcagagggctggggcctgacctgttgtccctttcagcctgcactcccagaatgcattcagagaacggggaattttactctaactctgtgtgcggtttaatttgaagtcttcccactataactcttaggaatactttggagtagttatagctgtggagcaccacaaggattctttcttatcttaaaggctttactacacattctaaaaggccaccgagagaacatttttcaactgggtgggggggtggggaagtacttttcatttattcatttctccctccctggaggaatttacgcctctaatactacatgaaatttgaaaagtgattttacatgtaacccttactttagcagcaggtcaaacctgtgagggactgagagagactgtgggaagcattttaggacatggctggaggctggaggcttgtggtagagcacttgcctagcagatgctaagtctagggtttgatccctagtagagcacaaacagcatgtagctccacccaactcccagcgggccgagctcctctcacttccctattgtagggcttaccctatattcatattttctgctccaccatgaagctgcacccctaaagccctaggggctcctcttggtgttagccagtgtggaatactaacctctctgtcccctattctctgagatctccacacaccctattgtagggcttaccctatattcatattttctgctccaccatgaagctgcacccctaaagccctaggggctcctcttggtgttagccagtgtggaatactaacctctctgtcccctattctctgagatctcctgtgtggacacttataagcagtagacttccgcacaggtagaagagccacagggccttactagcttggcgctttcccaaccctgagaacgtgggctcgcagtgaagctctgccctttgtttccttttgaacatttcaaagctcagtttgaacacaggaaattcttcaacatggttgcacccgctatttcaacacaacagtatacaaatatgcactggcttccagcccgacaaattgacatttgacttcttggaagatggtcggtattgtcaggaggatggcttgggttctgatattcaagcggagggtgaaaggcaccctgataaggctgagcccaaagacgtgggctcacttccatcaagtaatctgtgcttcaggcttaaggctttcccctatcagaaataaacttgggattctaactaagtctcattgttggaaacccaagtggggactgtggtctgagggccccttcaagagtttaatggccatacattccccagctctatccccaggggccttagaaccaatgaatagtaatttaagatggcacgaatattagctcatgttgtgtactggccagaggctctggggcccagggccttccaggtgtttcttctctttgagctttatttctgcatcatatcctggtatttgtgacattcctcctcccagagctcaataagagccaggctatgctgttggctgagaaaacatcctggacccccctttttcgctgactccggcatcctctggtgcatagcgggatagagtaggccctacagtgccccaagtcccacagtctgtgggagtttgtccctcttcacagttgacggcattgcagaattccctgtggcacagtaacacaaacccttattagccaatggtgtcgttgcaataaaaaccaaccccactgcagtgtcctggtcccaggctataatgttacttcttaattcccactgcatctttaccatttttattacagctgaacacacgtttctcattagtaccctgggcgatatggggaatcagaatactggggattgtgcagaatcggtaccagatgtttgcgtcagctttctgttcattagggtggaagatgtttgcagctcacatcgagtagatatgaaaacaccttcctgtgcttccaaacaatgtccttccctccagatttgactcgatattatgtgaggtgtgacagcaatggcttctttcaggggcgggtagattaaacatagcatatgcagcgaatacaaatctgtccccaaaggtttcatctgcatcctgtccgaggcggggccctggcccacagccagcatggttctgtaacccagcggggaggctggatgcagtctatttgcatttttctctgtgggtagaactgggaatttagatagtgatgtcacgcacagtttcccatttgtccagataatcaatcagtcattaattgaatggaccaagcagagatttggtcaatgagacaggaaccagtggcctttcttcagtgagggcatggagtctttgaagttggcattgggcagttccgacctcactgatttttatcacgctgtcctgttagatgtgaatgcaggtttgtgtgtctgtctgcagagtcctccatgaagacctgtgatgtgcaaagcagaagtaggtgttgtgttgttatgagagagtctggaaaatggttttctcagtcccttgttatttggctggtggggcatgactttgggtcagcaaaggacccttctgtgacccggtttccatcactctcaaatcagaattttagctgcatcatctccgttgaattacaaggatcagaaacaatacacacaggatgtgtggcccagagctggtacatgctagccttccacaggagagcttgttgtggggcctgttataccttgtagacagccctgggcagtgcaaacctcacagtgttgctttggaggatgttgctctgtgagggaagctggtttggtgatggcttcatcagtgtggctgtggaaggcactgtgtgtgtttgcactggggaggagggtgatgcatgataacaagccaacctcagggcaggagagaggtccattctaataggacatgatgcccagtaagatttggggaggctggggttcctaaagagccaacagagaaggatcaactcagattatacctggagaccacaggaaatttagatatgagccggggaggggcaggagggatgacacagggcagaacatgtagcagatggccagaattcctgttgaggaatgaccagtcgggaaagctcaagcgtggaatggccccagaggggatctctgagtgcgtgattgccaaggacttggcatcttgcaacaatttagttatagtggaataaataagatttattctactcacttataaaagtttctgtgaggatccagataaagcgtctgtgacatgactgtagctctgcaatgtttagtgacggaggagcctggtttcacgtttgtttacttatctacctgaggctggcctacgacttgctgtatagccaaagatgatcttgagtttctcatcctcctgcctctttttcctaaggctgagtgcaggggttacagacacgagccaccaagcctaatttatgcagtgttttgagactgagcgcagaatttatgtgctaggctagctacctaccaagccaaataaatccccagcctttttctaaaacaaaaacaaaaacaaaaacaaatcacaaaacccaaaacaaaacaaaatgcaaacagaaacccaaccaaccaaccaaccaccaccaccaccaccataacagtacatatgttgatgaatttagagaaagcagtctctgtccaggtttcctctcaaggtggtgagggagccctgaggctgctcactggtctctggattacagggtcaggattgcataggaacaggaggactataggtttttagctgtgtccacaagagaaacctctagttggtgaagatgccccccagttcacagagcattgcagagcaagccagtcaggcaggtgtcagagcacactttcctggtatctttcccttgatggctggaggtgttgcattcattccagttagtgcggcaagaaaagaaaccatcactgtgccccctcagacatggggtgggggtccgtggtgtgagccatataaaaggcttagctaaatgcagccaggtcccacaatgtgtgggcaggccttaggtgagctctaacactgtgtattgcatctgcattctataggtcaggaaggagtttaagacagaggacacgcccccttcctcctgtaaccacaccccttggaagactctatgcgcgcagccattggttccatctcagaacttggtcactgtagccttgtatagatgcaaacggggctgggagatgcagccttcatttggtgtgatcctgtgcggaatagttggggaaagaacagttgatgtcaagaagctgataggaagtctgtgccttagccagaacagctagcacacagttaagcattcggggtgaggcccaaccaggtttaggcgggctctcttagccttgggttgtttagggcttcacctggagagcgaaagttcagaaagtcctttttagaaaggacaccaccacatttatggtttttgaaatctttattttctttttatcccctctctgggttttggttttggcctctggtacatgctgtactctcagcataacccagctatgccacatgcgatttctctatggtgagttcctggaggaaagtcgctgggtcagaggataggccttttgctctctcacccagtttgtggtttctggaggttgctctgaccttacatataaaatttttataggcgtaccctccctcttgacattttaaaaaatgaaacatttcaacataggaagatgttgaaactgcattcactacacatccaagttcctcgcagttaacattctgcaatagttgctttatcagatgtgtgtctgtccatccagacggctccattttggatgcatttcagagtacgttacaaacctcaggatgcttcagcacctatgctatgatagctttctttgtttgtttggctggttggttcccacagactgtgtgaatactgctcagtcttgctcatcagactgctgtctaccaagggagaaggccagaggcctcaggtgaccttagaatagtcgcctaagtgtgcagagctattgtccttttgtttaagatgcggaggacgccacctcctcctgctgtacaggactcagcattgcccagcagagtgggagctgtgtgaaggggaatgatcttgttattatatttactatatcagcctgacggtatatcaaactgttgaagacattgttttatataacatttaaaatttgttagatgtgtttatttatttatttagtgtgtctgtgtgtagttgcacatgtgtgtgaatgtgtgcttgtggtggctagagcttgatgtcaggagtcttcgttactctccaccttagcttttgagacagggtctctcactgagcctggatctcattgattagctggttggtaagctctgaggatctgctggtcttgccttcccatagccagggctacttgctgtgtgtgttttggggataaggacttcacgccctcaggagcaggcactttatcttctgagctgctgcctcaccttttatacttttgaatggataatttctcacatacacatcattattttttgtttgtttgtttgtttgtttttagtgtatgcttggtaatacgttgtgggctttttttttccaaacttgtagggaaaacaaaacataatgagcaaacacaaaaatgctggggtgccaggagcactctgtattattaaatgctgtaagtgccaggagcactctgtattattaagctttctgttgccgtaacaaaaaccctgggatataattaagtggaagaaaggtttgtgtctgaggcattatatcatggcttttgggtcatggttgcttgcttctatcattttgggtctgtagggacatagtgtgtcctggtaggagcacgtggtagagggaactactcatctcaggatagccctggaggcagaaagaaaggtaaggggctggaagtccattgcccgcttcaccacaggtgatctaacttctttacctcatgctccatttcctgaaaatgctgtcaccgctctagagcagccagagatagccacactgccacatcgaggtctcgagagagcctttcgacccagagcatggcactgagtatgtttagacactagactgcagaaggatcttagacaggcagctgtcctgccgctcggttggtagactgtgtgcatcttcagcctgactttgggctggagctgtaccttcctcctgccccccctccccccctcccccgccccctgcctcctgccaagcaaagggcaagagcaggctgctcttctggaagcacctgaggagtgctggtgaccttggagagaagaggcaccttgagcgggctgcaggccccttgggagatgaatttggtcaaatgacagagactgaattgttcttgtgtttaatttgtgatcattgtaaatcatggcaggaggttctgaaaccaacttggtgtttccaagcccagtagctagtctatggaatatcatatcatctgtgcccccagattccggagggacagcctttctctgaggctcaccccctgccattgctgtcagccccttccttcactgccttctgccttctcagaaagcagctgggcactgtccagcaacagagtggcagggattatttgaaaaggcacatacttcatttcagaccagatttctattatcaacctagataatttctgtgagtcctgaaatagacatggcccagcaggccaggtaccagtttatgacatagcaataaggtacacaatggctaggccagaattacagatggccatttgagactggggctgtaattctaaagagtacctttgttatttagaagccaggaggaactcaccagaatgcgggaggactttgatctgggttccctcagaaaagcctgcagcttagtggtgccttgggctcacattcctggagactcattggaatgaagtgagcaaatagcagcgctcacagggatgtgtgagggggaagagttctaggaaccctcccctctaccttctgacaaacacagattaaataggagaaatagaatagaataggaattcattgcaaaagaggaaagttcaaccataagccaaaaatccagaaacatctgctccgtttcactagggagggggactgcagatatgggaaatctgagggtttgaaagtgtttttaggagaacccagtgagcttggagagtgtgaacggcagaagacagttacacaaaggtttgccgatggttccctgtgaagtactgaatgggaccaacatggaagaccatggactgtgataagtgtccaggtgtgtggacacactgcaggctctcagcctgccatgagttcacccaatgccttgggatggaaccagaggtgattacatgcttccttggggtccagactttaaacagtcagaaaggcaccagagggaagtctcctctagcttctgctgctgtctgaattcctttataaagttaaaagttcaactaacatcccaagatgccgtgttttggggtgacagccccagaacctctttagtgtcccctttcctctttctgggcacctgtttatcaatatgggatgtggctggggaggagtggaattatagcttataccactgtagctacccattgctcgcccattagttcccgtgaccagtccctgcaggaaagagggaagggtggggggagacagagggagagggagagagagagagggagagagagagaatacataaatgaatatatgaatatgaaccatcttcatgccaggtaccatatggagttatgagaacctagcaggcgtatgagaaaatatgaagatgtagctgtcaggaagcttacactgtaagctgtactggttacactggctgtaacaggtgtacacacctgtagccctgtggtaaatgagccagaggcgctaggtaaatacattatgggggatgaagagatggggaacagaggaatacctccttcagctggggaggggggcatttattgtgggggtggggctagagttgaagagtttgggtgaccaagacaagctttattaaagacatgaggttgaggattttcatgcttcctctggtgatccttaagcaacttggtgcagctgggggtgggatggaggcaggaagggtaggaggctagatggggcaaggcctgatatgtgccctattaaggggctaaggctatacttagcagttctcagaggtcagagcatagtcgtgggtagggagggcagacatttgcatgtggagcaactgtagagttgtattcctcctggttagaaaccaccctgctgtagagatggctcagagaatgtgaggggtgaagccttcttaattgtgtggggacagctggaaacagaggtggagagggatggtgggtttagacttgaaaaaagcttggttggttagaggaacaggaaaagagacctctgccctacttgacttctgccctaaactttgccatgcaggtctggctccaaattcctcttcttcttttttttttaaatagttcttaaatttgttttattttccctaataaaagaaaactcagggctggagagatggctcagcggttaagagcactgactgttcttccaaaggtcctgagttcaattcccagcaactacatggtggctcacaaccatctataatgggatctgatgccctcttctggtgtgtctgaagacagtgacaatatactcatataaataaaataaatcttaaaaaaaaaaaggaaaaactcttaaaaggtattttagactattcagggaatatatgtacaattagatatttaatattatttatgtgtatggtattctttggacttaaataatttattccagctatctcagattttctcccaagagaagaaataacaactcaaatgtccattgggaggtttccttcacccagagggatatgccggtgacacataaacctaaagagaaatcaaacacacatcaaaattatgcaaaaaaaaaaaagtaaaaggttgggatttcagatgatgagaccagctttttaatctttttggagttctagaaacttagttgtaaatgcttatctgataggttagcagtgaatttatcatccaaagtgtttctactcatgctgaacagctcgtgtctgcaattgtgttcataggtccagagcccagcacccggtgtgaactgtcaccgatcagtgcctctcatccagtccaggccctgatggagagcttcaccgttctgtctggctgtgccagcagaggcaccactgggctgccaagggaggttcacatcctaaacctccgcagtacagaccaaggactaggccagccgcagagagaggtgagtgtgggcattgccctctgagtctgagacattagagtaaacttctgtgagtggactctttcttccatgttggattctgggagtctgaactcacgctgtcagccttgtgtagaaagcacttctccgtgctctcctcatgggccctttcttttctaagatcacatttcccttctttcctcctgccttgctgtgtcttaagaacacattgctcctggaggaggaatcagggaaacctctaggacagaggtcagtaccctgagggtagttccttattgagttaccatatcttctccaagatggcagtcttggtggtcatggagaagtcttggaggagaagggaacggaacaagctcatgaatattcagtttgttctgggctccaccattgataagaaggacatcaccgctccaggtccctccatcatgtccagtctacaggttaggatgcaggtgtgaagacatgaggttcagagatgaacagcccattcctcccgtgactcagcagtggcttagatggcgccttagcggtctccttgtaacttgtaaagaggacagatttttttcccccacaaaataacacagggttgtcttcttttttctgtttttttgtttggttttggtagcaacccctccccctccccccccccccccccatggtggtggagttgggaaaaatgactgggaaaaaaaaaagaattaacctttcagctttctcttggtcagagaagtgaattcccagagctacctgtctatgtgccacaggaatctccttgcctttcggggtacacaggggaaacgctggcctggagcctccaccaggaaaaacagaactgactttaatctgatgaaagtgtgcagtgttggctcatttcaaagtcagggcatcaaacccttcccagctccattggaaattattgtcagtcctcttggtggcctgccattgtggctgcaacacattcctcaggtcagatttccttatcccagtaatatgtctttaattcttgtagtacttgggagagtttgtggcgggagggggagggggggtaggaaatacagcccctgtgaggcactgctgactccagcaattcctcagccttgcaatcactcatcttatatatggttctctcagagggactgagggggaaggaaagtccgagctgttgcgggaataccaacaaccgaaaaaattcttaaatcatgttaatcgctgttcaatcatgtggtaccactgtggactctgagaaatgaacagattggatgagaccagcacggcagaagaaaaaaacttcagggaggggcatctcagaacagggcagcacagagggtgtgtggttagctaggggtttctgcagggaggccccaacaccacactccttccgtgtctctgtagccagtgtgtaagctctctggccagtgatgtaaaggcatgtctgctggtaggcctctgagggaaactgcattgttgtggtccttggagacctttaaggattagatgctgtagttcagggctgcctgcaagtctccatagctgtcatgtagtagaccttggagtcttctacttgtatccaggagtattgaaaagaatcccagacagaggaggagggagtttgttgattggcaggtggacgtggagaagtgttaaactcttaacccttttcatagatggctggagacacatcctggctattgtgctaactgttttgagatagcttacccagtccacgagttagcagttctactcagaaatgacaactgaagtgcctacttaaagcttagaaataccttgaatagccatcaactgatgaatggctgtgatatatctatatattggaaggttatcagacaatttaaaaggcacagttacagaaatactgcatagtacagatgaaatttaaaaatactgtgctaagtaattgggatagtcacacaactatgcattatataattacatttaaatgaagagtgcagcgtacatacggagaggtaaagagttaagttaagcaagtgcttgcttagggctagataggaaagaaggaggtagggtcgactattacgggtagtgggggccttcaggatggaggtgaacatattctagaactatcttctgattcttacacagccctacaactatagcaaaattgctgagttataatttaaatttgattgtacgtgaattgtatctaatttcttttaaagccctttgacttggcagggtctagttagctcataaagtcagctttggccagttccaccccactttttctttttttgttctttaagaactgaaactgctttgccaacctagactccgttctttttgttactctcactggacgacttggtttccgtagctatggcattgcatgggctatgctaactgtaatggcagatgtttggggggtatttgtagaaaggccagagttaaagactttgtaaagtctataccaaacttaaggaaagtatttttcaaaattaagaaaagaaaaaaaaaaaaaaaaaagaatgccttggcttacagaccaacccgtctgagcatgcctggctatcaacaggagatcttccgtaatgccattcttgaatatggggaattgtgaaaccagcccggtttgtccttagcctttagggatacaggacaagcacccaagctatgttagaccaccccttctctaatatttgaccaagcccctacctcccaggtgccattcatctgcggcgaggtttcccattttccttggcagaaggggaggcaagggtctctgctcatggacatggtcactggcagcttgacaggatctgaggaaagggttctgctgggctgggtaaacagcacacagccaggggaacagggcttgttgcggcctgttgggnnnnnnnnnnnnnnnnnnnnnnnnnnnnnnnnnnnnnnnnnnnnnnnnnnnnnnnnnnnnnnnnnnnnnnnnnnnnnnnnnnnnnnnnnnnnnnnnnnnnnnnnnnnnnnnnnnnnnnnnnnnnnnnnnnnnnnnnnnnnnnnnnnnnnnnnnnnnnnnnnnnnnnnnnnnnnnntgagatggggttgggtggggtggggaattgagggtagggggtaaagagtcacaatcatggaaagcaaaggataactgtgtagtcagctctctccttccatcttcacaaggattcagaactgggggctgcaagaatttctgcctctggggcatcccgctggccggggtatttgcttctttcattgctcttcctggtgcctgctggctagagcaacacccctctgcttgcatctgttctgtgagccctggggttcagtgcctcagtgctctgcctgactgtgagagggtcatagcaccttcccaagcttgttacagaacactttcccatcaggcattgggatggtgacagtttgtctcctgtcttctcttgcttcccctacggtctgtttcctgtagtggtacgcctttcctcttcccacctgccgagggtcagccacctgcaccactgcacacatataggagacacggacacttattcacatttgctctgtattgaaggaaaggctgttctttgggagatggggtaggggtggggctgattcccgggagcgctgtgattatacgcatgcgctgccacattcagtttatgtggcgctgggatttgagccctgggctccacacattcccagcagacacactgactcagcccatgaaggatagactgtcggtgggtgtgccagtgcctggctgcaggtctggagtgaggaggcttcactcctgtggggaagggactgggcttaataactccacttgtccatgatctctcaaattttgatatatttatttctcagcctctttctgagagaggatttggggtgtgcgcccaacaacatgcacagcagcggtgtaggcagaagtgcagagagaggcatgaagcagatgactgcactttgtcggccatgtggatctgtgtgcaagggaagaccgcagtgtattgctgtgcaggtctctgagcttgccatgattgagcctgacactcagatcctagattcttggcggttgtaccaggtggttgtgttactcacacatgtggctccaaaccgttctgtctttatacctgcctcttccttggcttttcctgagggcagggaagaccagaacaggagaaagagaaggaagggaacaccccgaggtgttctgctgccctttaaacagcttccctatccccagataacagcaatggtggctctgatggtgcaggtcatggtgggccatccctttgccaggcactcacagagactcaggtggccctctgcagcctgaaaggggaggcttggctgtctctattttagtggaagggcaagtctgggctttgggaggccatgctaccagtaggctctctcccactgaggagtgtctagctctgtccccactttgagatggcctctcttgccttaagctcttgctttatctcaggccaagtgaactgtgccagttaactaagggaggcggctctcccaaggaaggttcaggtttgtgtatcagcttgtcacaggaggttcctgctcttgggttagcatccttactgttttaattcccccagggcttccctgtagtattggagttggtctcagtgtggtagggcgtcttctttggtgtggtttaggattagcatagcaaatgccagcaattataaaacacagtgctctcaaccccaggagctattgctgggctcacacaaaacacccctccctgccaggggcttgttttcaggcaaccaccccaaagctttctgtggctttcataaaagtcactccgtgccacctgagaggtgacacctaccttagctatgtggagggagctggcaagttaagagcctcccactcacagtgaagaaccttgcttgatctcaaatctgcttggtagtcccacctgctgcctggatgtcttctccctccatattcacgtctaccagcctctgatcttctatttctgtgatattaacataggaacaacttctttcttctcctcctttaccctttgaaagtcagtcatagcgatactcagagaagcaggaaaggtgtatgtcttgcccagacccatctcgaaagaacaggtatgccacttcaaggttggatgtttggaaaacacagagcagagcagaacaccatggaactagctacatttcttccctatgggaggcatgttcgttctgacagtagtcattaatgtcttcccaatatgagtcctacgtatatacagaaggaaatgaaccctcaaccctgaggggttatttgcatttgtagtgtcttatatgcatagagttttcactaagcacatgtagaagtcaatgcctcacacacagacatagacacttgtttcttaaaaaaaaaaaaaaaggaaggaaaacttattgtatgtgtttgttccagtgctggggattaaacttggggcctcataaatgatagacatgctccttgccagtaagctaccttctcttatccttccttgagttcataaatagataggtaggtagatagatgatagatagatagatagatagatagatagatagatagatggatagatggatgatagatgataaatcgatgatagatggtagatagatgatagacagatagataatagatagatgataggcagacatatgatagatagatgataatagatgatacagatgatagataatagatgatcgatagatagacagacagatgatagataatagatgatagatgatcgatagatagacagacagaaagatgatagatgatagatgacagatagatagataatagtgatagatgatagatggagagatagagataggtaggcagatgatagatgatagatagacaaatgatatagctagatgatagataatagatgatagatagatagatagatagatagacagacagacagacattctggggtatgtgtgtactcccatgtacgccatgttgagtgtgtgtggaggtgagggggccagcttgggggagtctgttctttccttccaccatgcagattctacgatgtaactcaggtggacaggcttgactgtgaatttctctgcctgccgagcaatcttgctggccttcacattcagtttttaaacaagcccctccatacataagcacagcctgctgtttgattggaaggggtcatcatgggagtcactcctgtgaaggaggaaggattgcttcaacgctcagcattgtatcactagcctacagcagggttattaaattccccgctttctccctccctgctcttactctctcacctcaagtcctgtgttatggtagaatgattgccctaccttcaaaggcagctggctctgacacgtgggaccagagaacctaacctaataagtcattcacatcactacaaaagtgtcatcgcttctcttgaagacacccagtgcaatctaaatgatgtctgctgggcagtgtgacagtgttgggccaggcctaggtagaggagaggggatgggggcacagctaagcagggatatcttaacagatctgtgcagctggagctgaaactgcctgctttagtcaagggtggtttctaacaagttggggcaagatgtgtaatctgaaactacagctaactgtcagctaagaactctctgaaaccaaccttggagctctgaacgccaaaatcagaggtgctatgaactccagtcttggcaaacaaatcagcacacagaccgagggaagaagttacggcattcatactgggacttggacaggttacatagtttaaaccctgtcgtttaccaaaggattgcccacagggtgtaaaattgcccgacaaagcttaggttgcaccccagcaggagaatcgagccacatggactgtgctacttcagtatgagggagtgctgggttatgttctacacggcctggaagctggtagattggacgaaaccccaaacaaacattctcttcttgctgccttgtaatcctcaggatggggaagagaccatccttgacccttcttcatctgtccggcaacggtacttcccaactagtgtagtgtttgatcttcctggaggttagggtcacagccttggtctgcgctgttgctgctgtgcttttgactcttaaaatttcctggactctttttagaacatgtttctacgcgagtgcccgccacatttgaaaatgtgattggctttccttctaagcatgtctaatagcatataaaagccacaggacaatgcacagagcagatctatcgatgagtcttaacccccaacgttgccagttgggcagatgccctgtgtgtgtgtgctgagtgtgtgcagatacccagagtctgtgcctagtgtgtacaagcccagcgtgtgcagatacccactgtgagcagataaccagtatgtatgtactcagtgtgtgtgtgctgagtatgtgcagatacccagtgtgtgcatacccatgtgtacccagtgtgtgcagatgccaagtgtgtgtgtgtattcagtgtgtgcagatacccagcatgtatgtactcagtgtgtgcagatacccagtgtgtgcagatacccagtgtgtgtgtattcagtatgtgcagatacccagcatgtgtgtactcagtgtaggcaaatacccattgtgtgcatacccagtgtatgtgtgcccagtgtgtacagatgcccagtgtgtacagatgcccagtgtgtgcagatgcccactgtatgcagatacccagtgtgtgtgcactcagtgtgtgtgcccagtgtgtgcatacccagtgtatgtgtacccagtgtgtgcagatacccagtgtgtgcatgcccagtatccagttatccaccttatctgccatcttgacattttgtttgctaataaagggaaatttactactaacattttttatttgaagactcacattccatagcagtgtttatcatactaccttccacccttcccttgactgtgattttgaagtgtgtctgtataaatcagacacagttattttaccttttcgttccctgctttgaagaggactcatgtgaacttggcccctctgcctcaaggctgtgtttcgttcctcatgcccccctccttcccctcctttatgaactcctgactgagtgaacatcaggacatccttccccaccccgcacccccattgcctgatttctgttcttctgtgcttgcctgtgtgtcatgtatggtgctgtcagaccaactcaaggactcctgggactggggaggggccagaccagcactcccgtccttggaagtgaagatgatggtggcccttggttgagagatactctatgcactttgggctggcatgtatgcctgtcaattgtcaaatagcattaccttttaaaaagtgtctctgaaatggaatttatatgaatacactgtcttcagacacaccagaagagggcatcggatctcattacagatggttgtgagccaccatgtgggtgctgggaattgaactcaggacctctggaagagcagtaaatactcttaacccctgagccatctctccagccgaaatggaatttaagagtcttctaagtcagttctcccctaccccagggctgacttcccaggccagcttcctggcaccatcggtatcaccatggcatctaaaatctgtaccatcgtagatctacccaaaccctgcatttggccagtcgtcattaagttttatctccattttctctgcagtggctgtggaatttatctgtcctatctccttaccatgtggcctccttagtctcctggggaggtcagcttcagcttcagtctctcattgttaccatcttgcttgggaactccttcataaatccaacctcccataaacaatgttctcacccctcatccgtttacttattcgcagacccattgcttgagttatttactaagagcgcattggataaacaccactgctccttactccgctatgtgtcagtagcacctgcaggaggttaaaggataaatttaatccaacacaaataacgtaaccttaagacattaacaaaactttgcaggaacacacggagagaagggctggttctagctggagatgagaagaaatgtccaaacagtgtgtatcttgtggaagactgggatgtcagcagatgttgtctggcagagtctggggatgtgtcagagtgaagatcagagactatacatgagagacagatctttgctgtgggtgatgtggctatacagtgtcaccttcagaccaaatcctgcttgttgccttatttgctcataaataacccatctacatgcatacgcttcacctgtctaaaatgaacaagtcagtggcttttgtttattcatagagtatacaaacaagcagttgaatttatgtattgatcgtgattgtccattgatgggatctggcatcaacaacaacaggaatctctgggcatgtctgtgaggggtgacgtagactaggttacctgagtggcaagggtcacataaacatgagtggcaccgaccattccggggtctggcttcctggattgagtgaaaaggaggatgggagctgggtacattcattccctgactgtggattccatgcagtgagctgctgcagggttctgcagccatgcctgccccaccattaaggacagtgccctcaaactgtgagccccactgtaaaccctcttccttaagttgctttggccaagtattcagtcacaagtaccaaatacgaacccataatctaattttacattttcactattcatactcaaagaaaattcatcactgcccaattttggtgttctccctgctcagccacccactggtctgtctgttctgggcattcatgtaaatagaatcatgtaacaggtggtttttgtggctggcttcttccacttagcataaagcacttgagattcgtggcatgtcttaatatgtatctgcacttgagatttatgtgtatttttaatatatgctctcttttattcctgagtggcattccatcacatggttgtaacacaactcactcatccactaatcagtctgatgtcttgtttttgtaaataaagttttattaggacacacccatactcatttgttgatatattgtctatggctgtcttcttgtgatgccagagttgaatattgtgtaacagacccatgtggcctttgaggccttaagtatttattctttggccctttgtagcaatagcttgccaaccctgggatagaagattgggataattgtggggttagattggggctaaaaagtgggagactagattagaatggccatatacataaggattaggatttagtgccatggatcaatgtgtgtggtttgtgaaactccagatacctgagaactcaggtttaatgtctcccccaggcttggtggcatgtacctgtagtcccaactacttggtggagatagggaagtcactggagcccaggagtttagagccaggctggtcaatataattagatactgtttgtttaaaaatataaaagacactgggaagagcctgagttttgactcaactgctgaatccattggtccataccttccttcttcttttttaaatgtgagttttaaagatttatttttaatcgtgtgtatgtgtatgcatttacatctctctttttctcttctctctctctctctctctctctctctctgtgtatgtgtgtgtgtgtatacacgtgtgtatgtacatgagttcaggtgccaggtgagggctctggattttttaaaactggagttacagatggatgtgatccaccatgtgggtgcagggaacagaacctgagttatcatctcaagagctcttaaccacggagccatctctacagcccctctctcactctctacttctgaatcttgtatattaatcctgagtacctggctagtacgtgggcttcctaagaatgggaactgggtctcgggatgtttgcagcatgccagttggcccgcacacgacaagagaacagtatctgcaagttccatgcatgccgttttaagtcactgcatcccgcagtgcatgcttgctggggttgttccatgcatgtggttttaagtcactgcatcccgcagtgcatgcttgctggggttgcttactgactctgtgatgtgatcagtggacttgagttggtgcccacatgctcactcttgtattgctgttcccctaattaaacttcattttattcatctccccatctactctgaagtctgcaggtttctgtttcagtccttctgcagaccaattctaaattcttgttacattcctctttcctctttggagttcagtcatctgctagtaaactagttagtctttccctcagctggatagaaagctataaatagttttttgtctactccgtgcttctcccttgggtaactcatttgatctgagcccggtttgaagttgggccatgcggaatgatctgtccctgtggtggtggtagggactcccagccagttcttaacattactgcacttaattaattttgattcctccagtagaaagagtacgttttactctactgtgtcttcttagataactaataactcgtttttttttttttttaagttttgttttcttgcttggtgactacttaaaatatccctgcctatatagtaatttgttccttgtttaatgtggctctttcctgtgtttactctggactccagtctttgtagcttgttttctaaggcagctcagaagttggatttggcagtgtcttcaagctttacccaccagaaccctacaggaagttgtgtgtcggccagaagagcctgtttacttagagcatggtgtccagcagaagcaagccgtttatgagggtctggtcttaaagacacaggagcctgactctgtgtttggaagacagtgagtctgacctccactgcactcgtgtgccctgccttttccttccagcttagtggggggctaaagctggatctcaaggctaactcgtccttcccagggatggcttcattctgtctgaaaggcttggatactaggtagtccagcttgaagccgaaagagtagggcttgctctttcttatggaaataaagctggcttctgtaaggattcattgtgggtgaggatattatggaactgtgttgaaatgcctctagctttcaggacctagctgagtccctgcctgctaccatcacagcgacagcaatactggaaagacattgtcagtccaaatgtgatgttccttcagctgcatctagaacatttccaaatgtgacagtcctctagccgagtctggaacatttccaagcacaatggtccttcagctgcacctagaacatttctatctactggaggtgaaggatggggtggagaagggaaggggaggtcttctttaatagatagcttcagctcccgttgacgagagagactagagaagatgcttatgcatctgagatccaagaccaaagccagcatcaggctcccggatcactgggtagcctcttccctggagcccaaacatccctctgtgtacattaactttgaatttctatttggtgacaggtgtgtacataccccagaccctttgtgggtttcatttgcctagccttgggcctgccacagggtcaatatccgtgtgctggtttaagtgatcactatcttaaagagatgagcctttgatttctgtgagcgcgcacacacacaggttctttgggggagaggagcaaagagatccagctgagagctgaaaatgaaaggcagagtgggggaggagcatcgagggggagggacattgagggggtggggcatcgagtgccctgtatgcatccattcccattgtcattttaatggttggcagttgtttagtttttttttggtgaagttcgagttgagatgtcttgcttattataagttttaacagagcagtgactttattaaagccttatataagtttagtacttcactaagtccaaaacaatactttgtaattctctttcctgttatgcctctcggcctgtttctgtatttctgtgtagcaacagtgttgtcttggagatccagatgtgtttgaaggtgcggatgaggcagagtaaggaaggcaggttgtcaggaggcctgcgtgtctgtgcttctgagtgaggcctttgggttgcctccttctcttaagtattattttaattcccttttaaaaaaaaaaaagtgtgtgtgtgtgtgtgtgtgtgtgtcagatggacggacagacagacatgtgggtgtgagtgtggaggtaagaggacaatttgggagacagttctctacttttgctgtgggttctagtctttggtcccagattgctggactttaggaagaagcacttctaatcactgagcaatcatgaccgccatagttactcttcttgttgctgtgacaaaatacctgtgtgatgcctcttagggaagaaggctcgcctgtgcgcccatgtgctcacaagggaaaccacagcagtaggagctgcttctggcttttgtatccggtgcctaaggtcgattgctcacatcctggctgactggggcccagtatgcaacctgaaggcccatccttaatgctccacttctggggctgcagcttggccccacctcccgaagattccgcaactcttggagcagcgtcaccagctggactccaaatgcaaaccttttggggtcagcatcctggagaaacctcagagccggccctttcctgtttagtgcacgtgttgctgtttgtttatgtttcctgctttcacaagcttgaagagctactcttccaccactggatattaggatagcgagactctaaatggcaagagcgccattctgaacgagtatttttctgaaagagtcttgttcattttaaatgctgttaaagatctaattctcagtgttttaactggaagctgttcaaatttgccaaatcataaaatctttcaaagcctgctccaagctacattttattgattcagctttcctcctatttgcattttaaaaagcccaacttgttttcttatgggggaagtgatttgtgtgtgttagagtacagagtgataaacgaacccgtgacttgccgtgagctttttaggtgacttgccgtgagcgttttaggtgtgttgtcggagcaacatacaagggtaatttcgagtccagttttgccacgtgtccttatgtatgtttcccaaacacgtttcctggcttggtaccgtgactgtgcatacggcctacatgtgtttcctattttttatgactcatacttacagtactcataaagatttcttctttatcttggctctgagtaatgagccagcttgtacacttccagcatagatgtgggctgagggttctgcatgtaatcctgagggaggccccttgtaggcacagtgcaggagtctatacttgcactgtatagtctctgtaagtgcagctgtttataggactgcgcactactcccggtaccattcagaaactatgctttttgttgatttgctgcacctttgttttccagatttcccccctgtcttggtcaggcagttttctgctaatgtgtgaggctgccccaggggtggacaggagaggccagtgctctctttctgttgcttgctggtaactgtggtaaaggggtcagtggaaggaaggaatggaagtaattaactaaaatgacatttataacttgtggccacagacacaagggagggtctccttggctttagagaactgttcagacctgagacacaataggacaaggatgacaactgatgtcaggacagcagattcctctttctttctctctctacccccctccccatttgtctctctgtctctctcctctgtatctctgtctttctctgtctctcctctgtctccatctctgtgtatgtgtgtgtacctgtgcctgtgcacccgcagctctgtatgtatgttaccgtaatgtaaaagtcctatgtcttcgtaggagctttgcccataggtaccaatggttccttcttggccagtgcttccaggaagtcctctcatattggtgcctgacagctatttaatattttttctagcaagtacatgagttgctgtgtattgtgattggcacaccaggattgcagattaatagaatttgcagaagatcaaatccccacgtagaagagaagactgtcttgttcactctattcacactgtggatttatctgtttctaacagtggtacacctccagagacatgcctgtatcccaactcaccaaacatgtgaatgttactttacacagagtctgcagatgtgatgaagaccctttcagtggggagattatctgggaggcccaagtactctcaccagtttccttgtgagatgctatgaaatagccagaagtggggaagctggtgtgacccagtagacagggagtagagggatggggtcacaaaccaaagaaggcaccctcaccaaggtactggacgagacaccagaaatgtttctccaagagcccatggaggggcatctctgaagacaccttggctttggcccagcaatgctgactggggaattccagccttaaacacatcaagagaataaatttctgttgttttatgtcattaggtttttggttagttggcatggcagccacttgagctgaatattatattttatctagtttggagaattatcctgagttccactcagctccgttttctcaagtttgttccctccacgtgtctcccatttctgaaaagaacactcccaaccactcgtgacaaccccaacccctggtgttacctatgacttccaggtttcctcaaatccagtcccatttcttctatcatgggactctattgtgaatctgactgcctttggcctttacctgtggtttgaaccaccatgtttatatttgaaatatggccatttctgacccagtcttttgagcattcaaggtctgggatagagtgctcacattggaaactaagtttcttgctttggcccaagttacttttctctgcattgtttcctgggataatgttacaatctgcttcctgggtcgctatggcaaagaagtatttaaaaaaaaaaaaaaaaaaaaaaagacagaacagtagctggaatcaaaccagcacccaataaatgccagtcactatctttataggctaatacgatctattctctgaacaacagccaacacgattttttaaaagcttcggccctatcacaaaacccatccgttcagctttctaagatggttcctcatcatttctagagtggcatctgcctagaagtgtgggaagccacatgtgccgttgcagagtgacgctgactactgctggccaccacgcataagtttggacaaacaaccaatgtgtacatatgcagtaaagctttttgccaagacactgcctgacccgggcatgataatgaagctttgagaatataaccaatcagatgtgagacatgcaaatgaggtatgataatgaggctctgtgaggaacagagagagagagagagagagagagagtagccaatcagatgaggaacatgcaaatgaggcatagtgcataaccaatccgggtgtgaggcatgcctctcctaggcctatataagcagcaccagttctgggctcagggtctcttcgcctctgcaatcaagctctcccaataaacgtgtgcagaaggattctgttgcagcgttgttactgctggccagtccggcgcacgcaagatagaaggacacttgcagggacttggggtgtcttccctgcactgaggcctttgctcctcactcatttacaataccagcctccccgactcccccacacctgactcccaccacagcatccaaccctgttttatctctaaaataattcatatcatctgggactaatctttgaacatgtgtattttctctcttcaagtagaatacccagaatggtagacatttttttgcctgctgatattcccagcagctaaagccatgcttagcacagagtgagcactcgaatatttatggaataaatgttttgaatgaacaaatacatatgcggatacacagtttaaccttggcaaataacattaaatctggtgattaaaatttacttatcaaatatttgtttggttagttttcgagacagtggcttactgtagagctcaggctagccacaaacattccatctgcctaactcagggtcctgagtcctgggatgacaggcatggtctaccatattcacaatttgtatttgggaaattctcattagttatgttttctggaaaatctggttactgacgtctcactattgtagaggtataaaacaatgtttcttaagaaattattacactcactatttgtgtgtgagtgtgagtgctatcatctcaacagagcagaggatagcttgtgggagactccagggtcaaactcagcttgataagctcggtggcaagcacctttacccaacatgccaactcactggctccaagagttctaaaacaagacttcatggtatctacccatggtgctacctatggtagtcacagagtctacctataatgatatttctattgctgtgctggtgttaggacccatccctgggttcttgtgtgtgttaggtaagtgtgtcatggagctacatgagcccagtgtcacccctcccactccccaccccaccccacacccccgccaccaacttcttgtttaaattttggtatgtgcctagagccatgtgaaactggttcctttgtgcctgtaggaagagactggtgaggttccactcctaaggtttcctccagtgctactgttttccaagtctacactggacattaagattatatttttaatggaactagcccaggcctccagtatgaaaaatggaataatttgcatctagtgagaaagcccaagagggcattaggatagaaagtgtctctggaattggtaaactagaaaaatagtctttaaagaaaccctcacagaagtggttggagccacctcacagctgactgacgacttatttaaaacagaagacatagatgacacaggtttacagacaagggaaagtctcctttcaacacttggaaaaacactgttaagtgcaaggcttaggtcttcctcactggtgagcttttgatggctctccaaagcgccttactgctccatcaggacagaatgccctcactgcgctctctctctctctctctccctctctctctctctctctcctttcttttgtttatcgaaatttgtaaggttagaggaattaatcgtttcagtttgctgagcagaagtccctctctacagaaattagaagcaggcgttggacagtgatccatgcatgcagccttcatggactgttcgcagagcattatggggatgatgagggaagcaggctgggagctcaggattcactcctggggactggggtgggggtgggaggcgatgtgggatcgagaggacacaggccgaaaaaacgtaacattgccttaaacacacacaacagaaacaacgtaaccacatccttaatcaactccagctggtccgaggtaaacaatcactaagtcactgagcacgttggaagggcccaggctgcagtaattggagccaggtgtgttaacctggcactgctttttggaggtgagaatttggagaagtttgaaatagggatgtggtttggctaagggttggagacagaattttccaagaccagagtagagactagtaaacaaaacagagctgtgttggagacaaaatgtgttgagaacagcaagtacctctacagcctgacagcttgtgcctgctggccttgctggagcgtgcccgagagatgggccctccagctgtacctcgggtcattaaagccagctgagttaatatcactaacactgggcaggataatgtaggtaatttaggatctaaagggaggggcattgttaagcctttgaacataaacacttgtccctaagcctcccgtttgcagatctggagcaagctgtgggctgggctgtccctcaccactaccaggtgaactgagccatcagggaagcaggccattgctgcttatgtttccgttaatgtttcccatgttcctgctctccagaaggggtaccccagagctcagcagagggcagaggtgactgagtttctgctcagaacttttgaacggatgaggcaatgggggttggggggtggggaactgctggataaaggcaacctttctcggttggattcggaacttctgaaaacttcagtgttaactgcagaacgagacccagccctgtgcatgctaacaggggctaattaaagagtaaaatgagccagccaggaaggaatcaccccacgtgccctggccaggttctatctcctgattctccaataagctccaaatcccaaaggagaaggacaggtccacaaatagcagaaaccattccttctctgttagcaagcaaagatggctgccatctgacctgtaggtgagaggacattcgtcagagccacgggcaacttaggaactataaaaacacggttcttcttggcactaggcctgttgtagaggcatggaagtagagactacccatggtcactagaatttggtgtctcctaagatgcagttggcttccccaaggtgtagatggctcttcagctgttaacccattacttgctgagcacctgcagacatagagctaggcagtgacaatcctgacgcccatgctttaaggattttgccaaacatagcaggcacacagcggaccagcttggtccctcttctccctgatccacttgagtggagctgccttgctttgtgtgtgtgtgtgtgtgtgtgtgtgtgtgtatttcagtgttgctttggattttgtttgttgacttaatgatactggaattaaatctctggtctgcttcgaaacagccatctggtaggaatggttcagttgtcgtcaatacgtgatgaggttaagaggcttacaatgggggacggagatcatggctcacgttctatctatgcagccctctttacctggttatttgtgccaaaatattactaagtagcatggaagcggggaagagaccgtagagttgaatttggaaaggaacactggaaaatgtttcaataaaacagtgttcttcacctccctgtagattcagcagtgcggggctctgctggcacgtcctggtgagctaggagtgaacgcatcgtggcaccgtggcttggtcttgagttcctgactcatttgaaaacattcatgactttgattatcagaggtgcccggggatgtgctctagagggggaactgttagatcggctgtctgttttctcttccctttgattttataaatacatatatgaaacaatgccttggtgtcagggtgaggcttagccccacatgctgagagatccacctgctatgtttatggattagctcatgtcatccctctaagagtgtgtgtttcccgtgaaggagctaagttggagacaagctaataaaacactgtgtctgtttctccatctccatttctctctcccttcgtccatcatccatccttcattcatccatctcttgggtttttgttgttgttgtttgttgttgtggtggttttttgttttttttttttttttaagacaaggtctcaacagtgtagctcaggctggcttcgaactcatgacccagcctactgctgtgtttaccaccacatccacacctagctggctgttttttgtgtttcttagtgaaacttggacacctcagcaacctttcgggttcgttttcccagcacttggagtgggatctcacaccctcttctctcactgagattttaatacacatttgattctgggtttctttttcttctagtatattttttaccactgttctcacggtgaccaaggttctgatttcactctctttatcctttgctcccgggacagccaatgaactacctggaggatatgtatgtgctccaggaagatataaacagtgtgggaaacagggaccttcccaactttacacatattcctaaaccaggacttctccccccccccccccccggccttaagacagatttatgccatcaaaattatacctttagaccctggcactgcaagtgtgccattttcacttactcttgacttttaagaaacattttttgacaaaattagaagctataccttttgatataaaatatacaaataattatcaatcttcctgaaatccagtcttaaccatgtgcccctcttgtctaaaagcatctctaaaggaaattaagcaagaccgaatacccgagcttgtcctgaggccaccgccctatctgcactacctactttgggggatgccacagagggcggtcactctcaggagatgctgcagttcaccgtttgttttgcttctgcccagcacaagaagctgcagggcacagagagccccaaagcgagataagaaaaagaaagagttgagaaacagtcggagaaactagataaagacatttgtggatcttttcagttgttgaaaggagacgggccacttctgctctcttgtgaaaacttggacaagttcaactttttaaaatcagccgtcccttatacacttgtgcaaacaaattagtgtggcctagcatttgtgacagtgatgacttagccacacaggcccctgtccacattgacatccatccttaaggactcatgtgttgaagagttactgctttgactttgtaggtggccacagacagggcttgcagtgtgggatccgatccagttataatctgacgatggaactcaggtggtcaggcttggtgggcaagatccttacccaccaagttaccttcctacctcaggaagttttttgttttgttttcttaaatctgcaagaatcagtacatttaagttcagcttgggataaagtccatctatcgttttatcagaaaatcactcacccttattctttaacccaggttgggaccaacagctgttgtactatgcctgggtaacttgatctaatgacatacatcttcccccaggcttactcttagaccaaatttgaaatggttgttttggaaaatgtgctgtgagttcctatgtagaccttcagactagggcaggaggttctgcctggcaagtccttgggccctgatatgcatctttcatagcagaacactgatgcttgaccggaggccttggaatcagcacaacacagcgcttcggtacagccctgactttgatcgtctttcagttccggtgccctggccctttcaccgagtccggattgctttaccagagctacaggctgaagcccatggactattttttttgtagtctggttgctatggtgatttgtagccttccatggaacttttgtctccagggaaactgaaggccttgcagctaccccaacctttctggtgtcatacctgaggtagtcttcaccaagctggtagcaagcccagcagtggtcagtttgtgtcaacaaatacttggaaatgaagcatctcgccggggatatgcagtatttcaaaactagcagctccctgttgctgttccccatcctatggggcctctgaagcatctccaagtctggctggaggcacagtggagtgagtcctagagagactggcattgaaaagatccttagtaagagctgtgaggaaggcagaggcggttaatggagttacaagttacagagagagagagagagagagagagagagagaaggaggaaggttgctgggcctctagtatggccagtgagaggaagctggcataaggaaagaatgcagtgggcttgaatttggaggatccttaaggcaagcccagcttctttccataggaaccaaaggaacagggaacagctgttggtgatcgtagtaggggagatataagacttgagcacttacctcaggcctctcagtatcctgattgacacaaatcacatctttactcctctgacacctgatgtagcaggtttagtgcttgcctccatgttaaaactgatgaaagtatcacaggcagactcttaactgatggccataagggaagagctgagactccgagtcactgttcttcaccacccgcctatactttagaaagagaggcgaagtgacctggaggatttgattatgggagataccggcccatcgtggaagtgattagaatttgttttagaacgagagtgtgaactcatgtatacatgcatcccatgctcaggtgtttgtttccctctttcggtactgaaccaggacctaagatgataaaacggtcctaaacccctccggtgtcagtcagccgtgtctctacaatgcagcatctgagataactaattttcaaaggggaagacttatttcagcttccagctttggaagttgattgagccctttgatttgggtctgtagtagggtagcacaacttggggtctcttcacagtgtttctctgtgtgtagcctttactgacccggaacttgctgtgtagaccagactggcctcgaacttacagagatatgtctgcctctgcctccaaagcgctgggactaaaggcgtacaccaccacaacctggctttgtttcctcttctaatgacttcccattaactacataaggctctagttacaccaggaataaataccaagactattcaccttgtcagcctgggggcagagaggtagagaaccgggcctgtgtcccccactgatggctggcatctctgagtcctctcactagcccctcattcattacaaccataagaactcaaaaaagtagttgcaactatctagtggggttttgtttttgtttttaaagagtggcatagaaaaataatgtggctaacggaaatactgagtcatacacgccgtcgctccctgtgcacacagggaggtatgttctctaagagtatgcgagtatccgaaggccagtctattagatgctgaggggtagtatccactgagtagtagattgtataactccattcctcagttaaaacatttagtgcccccccaagaggaatccattttgtccattcatactttatccctggggtatccagagccttctgtagttagtgggaagttattggaagaggaaataaaactgggcagtggtggcagacacctttaatctcagcaccctggaggcagaggcaggcagttctttataaactccagaccaacctggtctacacaacaagttccaaggcagccaagtctacacagaggaaccctgtctcaaataacaacaaccaaaaaaaaaaaaaaaaaagaagaagaagaaaaaaaaagaaagaaagtaaagaaatgaaaatcatacaagtttgctacttgttaactctggttagaaagctttttggcttaaaggctccgttgtgtgggtagtaatctgactttattgggtttttggctcagatctgatggtgtcatagaatactgttcatctgtgatggtctacaaagtataacttttgtctttgagataataaaatgttccttataccttaaattaacaaagaactatacttgaatcaaatataaattattttatcacagcattctcatgtcattagtctacttgaaaattaggtgaggttggaggctagcctctgctgctgttccagaggaccagagttcagttcccggcacccacactgggggtgcctctagaggagcttagcatttagcagaaagcagtaagaactaccaccacattggtggatactgttcaaccttcccagaacccaagtagcacaaaagcagagaacaggcgagttcacattttcttttgaggacatgcagtttcctctgcctgtggacatcagaactccaagttcttggggaccctgggacttacattagtggcttcaaggttctcaggacttggactggaagttgcatgacagcctttgcctgttttccagctgtagatcccagaacttctcagttttcatggcttcatgagccaatttcatggcagatttccttttatgtagatggtctccatgtaagaggcccatcacaagttgaaaacatatttaacacccgaatgtcacagcttaaccacacagaaacccaggaatgccaactgtttgctcttgcgatcttgcttactacccctcagcattgggaaagactttctaccacaaatcgctagcttgcaaaaagatcaacatttaggactctaaatatgaacgagatgtggtgatgtatctttgcaatcccagccactcaggagaccgaggcataagaatgctaagtctgggactatcctgagtgggcacaatttttttgtttgtttgtttgtttttcaagacagggtttctctgtgtagtcctggctgtcctggaactcactttgtagaccaggctagcctcgaactcagaaatccgcctggctctgcctcccaagtgctgggattaaaggcgtgcgccaccatgcccgtcaagtggacacaaatttgaggccagtctgggcgatatagtaagactccatctcaaacaaagcaaaatacacacacacacatacacacacacacacacacacacacacacacacaccccaaaagccaacaaacaaaacaaaacaaaaagaaggaaggaagtgatggagagagaggagaggagagaggggaggggagacaggagagaggagagaggaggagagaggaggagagaggaggagagaggagaaaggaggagagaggagagaggagagaggagagaggagagaggagagaggaggagagaggagagaggagagaggaggagagaggagagaggagagaagcagcttctccaagtgaggtttccctcacagtctgtgactgaggtcttatctatgagatgtttatgtttctcaggagaagcatgattaatacagccattttggccattttgaagtgtgcagttcagtgatgtttgtatatttaaagtgttgtgcaactagggtgatcatcaaaaagagccccatgccagtaaaccctcgctgctctattcccagcgtctacaactcccagtctgttttctgtgttcctggactcgttggttagaatgtaaacataccgctttgcagcagtgtctgtctggcgtgtttacttcacacgatgtttctggggcctgtccatgtagtatcaaatgtctatacaccgtctctttttatgactaaataatcgcgcattgcatgggcgataccatatttaattatctcaaaccacattttactagggaaatttttatattatgaatctaaccttttttctgtctgaagatcacataaagagaattttgagttgcttctataaaatcctgttaactgtggcatttaaatttataatcaaggtctaaatgtttgtaatgcaacttttatccttatttattcttttcctgtctgggctctgattctgcttattagtggtatttccaaaggattaattagagggagaatcacatattagtttggttgacaatgagaagaagacaaacagctatcaccgtaaacgcttgggtcctgaccgaatgataaaacagctcaaggcgtcttgacaacagatcttggcatttctaggactattcagattttggtaaaattagaaaacccattgtgaaagagtagcatgggccttatctctgtgtatgaaaaacccttcgaaatagtttcaaaatctgtacataggcacataactttaacctgtcagttaaaagtacctccgatgtttatcacactgagaagatgaaagatatcagctcattttataaaacacattttgcttaaaatgccacagtggtgtctagtatcttgtatgcaaatttaaaaattatttaaaagttgaagtacttacaaaaaatttttttagttaggagaatagcaaaaaatgaagcttattttaaatatgaaaatttaacatatataaaaataaaagtttgacatagcattgcaaaatgttaagtaggaccttacattctctgtcagctatgggagaaagtattttcattatttgcttggaagataattgacatttttatttcactgccaccttcgcagatcctaatgatatgaactacacactacggtttaaattggccaaccatatgcatggattagtcaggcctactgtatttttgttgcttggaaatgagtatcatattttagtcatataacttgaaaatcaaatggtttgtgtttaatttacacatttaattctgaaattaaggcctttgctagtccctgccacagcctttgcttctgatttgcctgtaaagaaacggccattctgtcagcttcccttggggaaagccttttgcttgttcttttctttacttcttccttcttttaagttattaacaagcactgagattgtggggtatgcatgtgtgtgtgtgtgtgtgtgtgtgtctgtgtgtaagtatgttcatatgtgtgtgtgtatgtttgtgtgtatgttcatatgtgtgcgagtgtgtgactgtgtgtgagtgtgtttgtctgtaagcatgagtgtatgtttgcgtatgtgtctgtgtaagtatgtgagtgtgtgtgtatgtatgtgtgtgtgtgtgtctgtgtatatgtgaatatgtgtgtctgtctgtgagtgtgtctgtgtgtaagtatgtgagtatatgtgtctctgtgtgtgtgtgtgtgtgtatacacatgccagaagaggcattcttgtctatcgatctccacttgtttgaggcagggtcttttcccaaactcaaggcccatgctttcccagttacactgggactcagtgaccacagaaccctccctggaactgggtccagatgtatttaggacttacctaggaaacagttaaaagtaataagctctggtgttttctgcatattaaatttgctctggccaggcgttggtggtgcacacctttaatcccaacacttgggaggcagaggcaggcggatttctgagttcgaggccagcctggtttacaaagtgagttccaggacagccaggactacacagagaaaccctgtcttgaaaaacaaaaaaacaaacaaacaaaaaaaatttgctctgtcacgtgtcaggctgtttttattagtaaactttatagttgctctgaacaaatcctggataagaagcaatataagggaagaaactggctcacagtttgggtgtgaacagttcatactggcagaagtgttcggtggttggaacaaagaacagacaggaagtggggccaggctgtgaactctctaagcccatgcccagttgtctaccccagcaaggctccctttacctctcaaagtttctataacattctgaaactttactactacctgggggtgactgttcaaacacatgagcctgtggggaatacttcacatttgcgcttgacacaaaccctagtcatctgaggagaaaaccttgactgagaaactgcctcaaggtcaggcagtgaacaaacacgaggggcattctctctctctctctctctctctctctctcctccctccctccctccctcccccctctctttctcttcttccttcctttcttattttatctatctatctatctatctatctatctatctatctatttaatgtatatgaatacaccatagctgtcttcagatacagctgaagagagcattggatcccattacagatggttgtgagcagccatgtggttgctgagatttgaactcaggacctctggaagagcagtcagtgctcataaccgacgagccatctctccagctccagcattttcttaattagtgattgatggggcagggcccattccctgggctagtggtcctgggctctataagaaagcgggctgagcaagccatggggagcaagcaccctccatggcctctgcatccgctcctcttgccctgttggagttcctgtccttgcttctgtcagtgatgaactaccaatgtgcaagtgtaagccctaataagccctttcttccccaactggacttggttgtggtgtttcatctaagccgtagaaaccctaagacagcattcagaccacaatagcccttcagaatgaaagcacttaagatttcgctcttctgcaaggaaatcgagatgtttggaagatgttgtgtgttaggaagatgctgcccaaaagatgaacaaatttcccactttgaatctaagttacttgttctccctgtctcaagaaagggcatgtgacaggaaactcaagttcctctaagacagcttctgaaacccataatatggagcgacaagattgccctcccagaccaggaattgcttttgttacattttcaagggaaaccagaacctggagtcctcaaggttttcctttgaccagaatgagtttccttagggagtacttgagtctactcctgtatcagttgggggccctgcagcttggtggttgctctctgttacccctgcgctcattctccttgggttttcgattctaagtgcggaaggtctgagacacacctgattgacttggatttgaagtgctcctcccagcatcccatggggccaaccgtgagggctaggaaagattttcagtgtcagtggaggaggattctctgccaagacctctcgctgccttggtgggggctgtggcccaccctgtccaggatcccttttaacgcctcttagtcctcttgggacttcttagaatttgatgctcccccccccacccacttcattcttttccagcagtaaaacagtttgacttggtcaccaaaacttccatgtcctcctccaacccgaggagaagggacgtgtgaatggtttgtggggacagagactgaggcatccaccactgccacttgctagccacaggatgggataaatcaccgcttagcatcaatccccccattaaagtaagattgggcagtgtccatggtgacatcagtatcttcatgtcctttaagattcctggacctccgtgtctgccatgtcccccgagccctaggtgcaggaattgtgccgtagttgtatcacttgggctgggtaaccatggacatttgtcttggaagttgaccagtgcatagcctggcagtccctggtacttgttttggtggctgagggatctgtttgtttttcttgaccctgctttaatgttcaagttgtacttggtaggggatgttctctagacgaggagcctcccttcttttggctggaaaatcaagacaatatgacctcatgaccatcattggactcacatttcattaattttattgatgaaatttatttatggttccttgtattcattttttaaaaacgtgttgatctcttcctggatgtctggccttgcactaggcacaaggctgcggagctaaacgtggttccatttttgcccttgaatgatgtgctctgaggatttcacaatctgacaaaggagacaaacatctgtagtgtcctgtggaactttccagctctgcccaaggacagtgaagcctgtggctggaaaccgtctatctgaggacatggctgtcctgtactttgagccagaaaccttggcttaaatacataaccttggtgtattaatggcatagtacactgtctacacagcctatgcttcagactgaaggacaatggaaaagtagttttgaatttgctgtgactggtggcctgctggtggtcctagatgtgttcttacagcagaacatacctacaccaagaatctccgcttttctgcccctttctctgcagcagctgagggcttctccgggaagggaggtccagggtccctggaatccctgtgtgaagctcccaggacccttccagagggtcatgacttacagcttcataaatactggtctgtttatattcgctcttgctcctcacccccaccccaaatttagttcctagtatttttccagggcattcaaaacatgcggtggagaaaacagacttatttctgcatcagattgtagacttttagggttttttttccttttgtgtcactatattaaattattttaagacgctcccagggaatccagaatcttgtcgttgttgggggcagggcgtgagtttgggaactcactgactatgttcctctcagctctgcaaatggcttcaacatgaaaccactgcgaggaagtttgatgtcatctgccatgcagtgtgaactttgacttcagtgcttcccctgacggagaagatggtcctatactctctgggatagggtagggacacttggtggtttgggactttgaattcaggaccaactaactgctcctaagaaattcagaatagtataaaagtttctaagggactttttttttaaacagaactctgactctactcttccaagaatgctttaagggaatctttttataccaattctcacgtggcggaagacgagtatgtcaattgcagtgtcagctgtcagggctcctccgaccagcagacccttgaaaactctgtagtgtttgttgattagctaagtacagttcccttccccagcaatcaggagcacatttcagaaccatttgggggtcccatttgagttcctaagaatatttatgctcaaacacaagtaaaaatatgaggccagccaaggaaccctggtgtcttgaaacaattatgtcccccaatctctgtgtgtaacacccgggtgctgggaacagaagattcaaggtgttccaattaccgacactgttgggtgacatctcccctccgcagaggagatggagaagggtctaaaaaacagcccctgcttttatggacctgggatgcaggcacatgctgaagttctttctcttatttgtagtgtaaactgattactgaatcatctatttcggaacattacttggtttggttttagataacagaagtctcccgggatgggttttagatgacttcactgcttcacgggtccacgctgttagactcacatggcagtccctgtgcggactgttgctttgtcttaacaaactctaggagtggggtgtggggtctcactaataagaaaccttttgaaatctctatcataggaatgtcctgtatgtagactacaaattccagtaaatccaaaacaatttttatggcatatttccataaaagtgggtttctttttctacctgtaaatatatagttcattttcatactacttggagattttgagaaaaatgtacagcgtttttttgtttgtttgtttgtttcatttgtttatttggttttggttttttgagacagggtttctctgtgtagccctggctgtcctggaactcactctgtagaccaggctggcctcaaactcagaaatctgcctgcctctgcctcccaagtgctaggattaaaggcgtgtgccaccaatgcccggctaaaagcgttttttttcttatcaagtgtaatatttaggaagtggagaagccagctgggtgtggtatcacaaatcagaaatctcagtactcagggtgttgaagcagtaggaggattgttgagcgtgagttcaaggccaggctggattacatagtttgatcctaaccccactcaagtgaaagaaggcaagaagcaaagaggagaaaaggagaaagaatagagaagttctccaccatgaggttcagaggacagtgttttcgtccttgtctggtagtgggtcagggcacctctcccaaaccggaagcaagaagatggtctctctgcccagaggctccttgaagttgtgagcattctgcaagggaggatgcaggtctgttttgagtgtccttataagtttgtgcacagataacctcagtgcaggcaggtgttacagaactgattagaccagctatcgtccttccttgtagctgaccagggagacgtgacacagggctgcactttctcatgtcaccaggatccttagtggacccttagtgaagtctgacacacataagattagagcaggagttcagctggcttcatgaagagtgagcctgaagtgaggagaacaggaaacctagacactaatcccagttgtcatctgctaaggtttcccctggaaagatgacctcttaagggcagacttgtgcatctcgttggatgaagccatcttgtttccctttctgccagtcccttggggttttcctgctcttgtccagtggtttcctccctatgggatgcatttcgagtacattgttgcaagattttagtgcctgggtttttggtttgtgtgtgtgtgtgtgtgtgtcgcgcatatgaagagggggtttatctttcagttccgttatcaaatgttgggtgactcccaaagattatccagccccatcattagagcatcacctgtgtttgggaaactttccaactcacatcacgcctgcattgggttccctgttacttttgaagctcataagactttgagtatttttgtgtgtgaattggataaaggatggagggtgaactcttcagactactgtgtggttttcttagagactgtcccatcctgcctgtcacgtgtccatgggggacatttctttgttgcattctgtctcagctcttcgctctagactactaccaaggacaatctaactataaaaccttgtgcaggattgttttcatttttttattagatattttcttcatttacatttcaaatgctagtccctttcctagtttctcctccgaaaaccccctatatccttccccctccccctgcttcccaacctacccactcctgcttcctggccctggcattcccctatactggggcatagaatcttcacaataccaagagcctctcctcccattgatggccaactaggccatcctctgctacatatgcaactagagacacagctctgggggtgtactggttagttcatattgttgttcctcttatagggttgcagacccctttagctccttgggtactttctctagctccttcattggggaccctgtgtttcatccaatagatgactgtgagcatccacttctgtatttgccaggctctggcatagcctcacaggagacagctatatcagggttctgtcagcaaaaccttgttggcatatgcaatagtgcctgggtttggtggttgtttatgggatggatccccaggtggggcagtctctggatggtccttccttctgtctcagctccgaactttgtctctgtaactccttccatgggtattttgttcccccttctaagaaggaacgaagtatccacactttggtcttccttcttcttgagtttcatgagttttgaggattatttttatataggggtatcttgaactcttgatccctctatcttagcctcctgaatactaggttacaagtgtgtatctggtttgtaactattgtcatttctaagctataactgatcctaaagtaggttttcctttatctgcctttcttcttcttcttcttcttcttcttcttcttcttcttcttcttcttcttcttcttcttcttcttctttttcttctcctccttcctcctcctcctcttcttctttttcttcttcttcttccttcttccttcttccttctttcttctgattttcagactagaagaaattaggcaattcatcccagagttctttaagatgtttgggttgttctcctcacattctgaggggctctgataccatcctgcttttgctgggttttggttgtctgtgtggtcccttctgccatgtttgcttaggtggagacagggagagaaaggcctctggggattgggttagcctgagctcacaggactctgtgcctgccaatttttctttttaagttctttaccatggtgtgaatcctcctttgccaaatggctctggggctttgcctgggacctctgtgccagaggcagagatgcatcttggccagacatggccacatactgaagaaggagccgtttccacgaaaagtgcacgctaagcttcttagaaatcatcccttggttgtctgagccaggcctcgacactcagaccatctgggaaactctggacccaagcatcagtatctgtttcatacatcttctcatttcataagcttaaaaatattctggttcatctgagacttgtatttattgatttttatacatattgagcaaagcttttgcatatttgggagctttaagaagtctgtgtcttaggactaactacaaaacaggcagagtcaacagctctggggaggacagctgctggtctttgggccctgatgtggtgctctgggatagggacagcctctgctgccgcttgctttagagggagtctgtgacactgtggtttgcaggtgctgtgcctcctgtcctccctgtcacctaccgctgtgtccagggagtgctgcagtctggacgcactctgctccctttagattgtgtcttgtttccagtagttatcaatctgtttacttctagatgaagacagtgactccagagtgtgctatgtgtctaaacaaccaagggacacattgtttcgctgttgctgtggttgacatcacagttcatctagtgctttgatttggggccatgctgattccaagtctaaaagtggtccggtatgcaggaatagctcctaacagtcagcatagctgatgtttttgtattttgctgcaaattagctggcttaaactcctttgcacatagcaacttcttcagcctctttttaatctttggggttatatattcatttattgattggctacagtgaatcaatagtgtggctgcctgcaacatactgacaacaatattcagctccagatgtttctttttgtctgtttcagaaactaagacaggcacactcaatagttaacaagtgctatgattatatgcacatgtgaaaactatatgtagaaaaatatgccttgtggcatcaagaaatggagaatatatcctattaacatttagagggtgtttgtcataagctaaagcatgggttttgaaagataagaaaactcagtactttctttatccataacttggttactgtaataaatgatactggttctagactggccctagaataagacagtaattcctcacgatcaaagtggaccagcagccatggggagatgtagtcagcttttgtgctatggctcaggtgattgcatagactcagatgtgtgtgggagtcatcggaggccagcgaggcactgggacctctggagctgcagctacagggagttgagaactgtgggtgctggcaaccaaactcaggtcctctacaagagcagtaagtgctcctcaccacggagcagttcctctagagccctggagcctctgttttcttttgatagaggcgttatactgtcagtttattctgtctgatctctgggcttcctttctttggaaatttcctttgtgctagtagctggaaggagaaaggcagcttgctccccttggcagcccctctcttgactttcagcactattttttttttttttttttttttttttggcagagctgacctaactttgtagagattggaagctacctgggagagaagaaagtcctttctgtgaagccccccccccccaatgaaaaaactcacccataaatatcctgttatgtcatgtcagcttaggtttctgacttaaaggataaggaatccctgaggaaaggtagttttattcctgtgtttggtgtaaaagaaagtgttctgtttacttctgttctattcttagtgggcgagccatgttttagttgtgattactggaactgatcatagcccgcagccgctgggtagtgaaacagtgactggttatcagcagcatttagctcaaccttgcatgacttgtcgtcttggtttgggcagtgagttgtgaagaagtgtcctatgctcctcggaatgaatggcctggggaaaccagcactgaactcttctactttgtgtggtctcctaggttaccctgcatctgaaccccattgcctccgtgcacactcaccacaagcctgttgtgttcctgctcaactccccacagcccctggtgtggcatgtgaagacagagagactggctgctggtgtccccagactcttcctggtaagtgttcaacacccctccctaaaaatggtcctggtgcagggttataatgactctggtttggttttgttttgttttgttttgcgagacattgcgtttcttgaggcaatatcttgctatctagatgagactggcttcacttagttctcctgtctcagtgccctgaatgctaggattacaattgtgtatagcatgcccagattgcaaagggtttgaaaaaagacttcttttcattaaaatgataccaaagtgtgttgcatttttatttgcacgtggggcgggggaggatgtttgcatggtgtagaaaagaattcacaggaagcagatgccacccacatgtcttctgtggaggcagagttgggtctcacttgcacagaggtgcaggacctgctgtcatactcttgtggcctgcccactggtgctccctcctacctcatggtattaagagtgctgtcaaagctgtaaataggttctgggtgtgtggtctctgaccacagaataaatacacatgagcccattgctatttgtatataacaaacctaatttctgagggactgtctgctgtcagtgacacagtgagctccaagcatgaaatcatttgtattttatttaaaataaaaaaagaaagaaagaaaagaaaaaaaaaagctggagacgagctcttgcagaatggtccaaatattacctactatttgtaaatcatatccttcggtgtttgccagagcctttgggtttgctagctgtggagaaacagatgggttgtttggatgaaatgtttggggtgtgatatcatgtctgatgagcagcagctcgcagctcgcagctgacctcttagtcagttgtgatggctttgtgaaggctgcctgctgtccttgctgcagagcctcaggctcctgagatgtggcctgtaagcagccccctcatccctccagggagtcacttttgacactctagggacttctcatttgcatttgaaaaacacttttaaccaattgaaggtatctatcaactaaagtaaggatccatataactggtagtagaaaaactgtaaactagaagagatagggaggttttatttgtagtaaaatgctagttattaaatacacatggaagaaatgatggagtcagaatattgttttgcaattataacagtgaaagttgatcagacatgaatcttcaacagatgttaggaagaggagagatttggagggacaatacattcatatattctctagatatgtttccacaagttacttattaatcagggaagaaaagagcgaccatagatagtaaagaaccctcagcagggctttaagcaagtgatcagacttaatgacaccgtcctggggcagatagatgtcgtatgtctgtaaatgagaaagaacgaagcatccctcatgtctcagtcagggtcacttgctgtgatgaagcaccatgaccaaagcagtgtggggaggacagggtttatttcactcacagctctctaaagcagttcaccacccaagccaacaaggaacctggaggcaggagctgatgcagaggccatggagggtactgcttactggcttgctccccatggcttgctcaatctgctttttttttttttttttccaaaaaggtatttctttttatttatttattttttattagatattttctttatatacatttcaaatgttatcccaaaagttccctataccctccctccaccctgctcccctacccgcccactcccgcttcttggccctggcattcccctgtactggggcatataaagtttgcaataccaagggtcctctcttcctagtgatggccgactaggccatcttctgatacatatgcagctagagatacagctctgggggtattggttagttcatattgttgttctacctatagggttgcagaccccttcagctccttgggtactttctctagcttctccattgggggccctgtgttccatcttatagatgactgtgagcatccacctctgtatttgccaggcactggtatagcgagacagctataacagggtcccttaagcaaaatcatgttggcatatgcaatagtgtctgggtttggtggcttcaatctgctttcttatagagcccaggaccacagcccagagataacatcaaccacaatgggctggtccttcccccatcgatcactaattaagaaaatgaccaacagctggatctgatggaggcattgtctcaattgaggttcccttctctcagatgtctctagctcgagtcaagttgacataaaactagccagcacaccttatgtagcaatccttctagaaatgaatgtagcctggttctaattgtgaggaaacattgggctgaaccaaatggagcaacatcctatagaactatccaattctctaaaaagtgaatcatactgggttggagagatggctccaaggttaagaacactggttgctgttcattcccagcgcccatgtggtggctcacaaccatctttaactccagtaccaggggtcctggtgccttcttctggcctccatgtgtatggcaatcatacctataaaataactcattaaaaaatagttacacaaaagcacatatacataatctagccaatagtatatatatatgtgatactatatatatatatatagtatatgtatatatgtgatacagtataacatagaaaagagaagaggagggaagagaaagaagaggaaggagaagaggaagaggaggaagaaagaggaagaggaagaagaaggaagagaaggaggaggagaaggagaaaaaggaagaagaagaagaagaagaagaagaagaagaagaagaagaagaagaagaaaagaagaagaagaagaagaagaagaagaagaagaagaagaagaagaagaagaagaagaagaagaagaagaagaagaaaatagtagttgtattatctgggggtgaggaagactaaaggcaggcaatggacaggagttatgaaaaaagacacagagttgatcgtttctttagttccactggagtattttgttttgatggtgtgtgagtacatcaaaatagactctatagtgaaagcataaggtcctgtatgaagccgtgtgaggctccacagctttagaactgctacccaaaccctttggaagttattccacctgtgtagactttgtgtttagttaatttcactgtgcattttttttaacttgcaaggtttttccttataataaagtatataaatttttaaaaaactatgcttttaaagtgaattatgaaaggccaagaaaggctggggaccaccctagcctgaagatgactaaaaaccatgtgacctcactgcaccatgggtcagggaacagcaggtgtaattagaactcagcctgctgactcaagtaccaacactggcttcttgcttttgaaatctgcactgttgtctaggagactggctttcttccaaagcaggcttagtggtaaggggtaaacaatttagaaaaaaaaaaagaccatgtttagacagaaagtagatgttaaaaagctgtggctctagttagagaatactagagtcttttgtagaatatttaccattctgctgtaaaatttttaactttaaaatgaagcatttaacatctttatcatctattttatatatatgtatacgtacatatatatattacatatgtaaggtgagagttattaagagtttaaactgcaaatacaattgagatattaaaaatgtctttattttattttccatgttacataggggcacacatgtcatgggaagcatgtggtgataggcaggtactttgtgggagtccttccagtttgctccttccactgtgtggtcatggggattgtcttagttagggttttactgctgtgaagagataccatgaccaagacagctcttgtaaggacaacatttactaggggttagcttacaggttcacaggttcagtccattatcaagtcaggaatatggcatcatccaggcagacatgatgcaggaggagctgagagttctacatcttcatctgaaggctgctagaagaatactggcttccaggcagctagggtaaggatcttaaagcctacacccacagtgacacacccaccccaacaaggccacaccttctaatatagtgctactctctgggctgatcataggaatctactcgggtcatcaggtgtggtggcatgtgctcactgagccagctcaccagccttagttgtgcctttttgtggagacaagctctcactgaatgtactgtgtagaccaggatggccttgaatttacagagatctgacgttctcttccttctgagtactgagactgaaggcgggtcccactgtgactgactactcttttttttttttttttttttttttttttacatttaaaggacagaacagtgataattaggggccactaatcttattcatttgactgtgtcctcagtacctaatctctttgtttttcctcctggtaactgttttctgtagaatctactctgtagcacatctgctaaggtgccatgttagtcacaccagctataattggtgatggtaagatcaagactcttataaagttgaagtgggtgtgtgtactgcagcccagtgctctaggaactacctagggatgaatgtcttgtaaatacacacacacacacacacacacacacacacacacgctgagtttggtggcacaaacctgtattctcagctattgcagaggctaaggcaggagaattccaagttgaaggcctcccgaggctatttagtaaagacagaggtgttttttggcaatttaggctctttctcaaaatttttaaaatgtgaaagggggcctttgattgggtagagcatttacctagcatgcatgaagccctgtgttctattgccagaaccaaaacaaacaaaccaacaaacagacaaacaaaaatatttaaatctaattgttgtgattagcacctttcggccccgggggaagtctggaaagaagtgaccaccccagtagtcaggataaccgcaggtgtcttgagcggatcctctttctagacagctgtggtccaggcagtaattaggcagactcatctccgtaaacctgactttccccagctgtaatgtgtgaataacaaagtcccacagcacggcagggaaagaagaatcttgatgtgaggaaagtgctcataaaatgttgagtgcggcacccaccgctaagttcccctgcatttgctatttctgctgtcactatgagaacaatgagtacttgtgaaggatattaaattaacatttgtaattgtgagtaactgttggctggctgcagatttaaagtccccacttctctgggctgtgggttccacgaagagcgctggccacacacactgtgctttgcttattgctgttggagtttttctcaccgctctgtgggatttaggggaagttatctttgttattatttatttacttgatgagctgtaagaactgcatcttgaccattagttgaaaatacactaatgaagaagacaaattttatatacaacttagcatcaaccttatttggagttaatcccatataaggacattgcagggcaagtgatgggcccagaatgtgaggtgtagggaggcaactgtgggagagattccgggacacccaagctccgcctccttcaggctttgtctgtctgtctacactctctctatggcctgggtagtcagcggatacctgttgctccatcaactcactacgccacaggtggtttgagatgtctcaaaagcctggcaactccccctcctccccaagacctgaaaagcattcatgtcttgttgcgagctgctggcagccgcaggtttcaggctgggggaggggagactacaatgtcatccacagcacagtctttgtgatgactgaagaccaggtattctatttgtccatccgtggagtttgttcatccatggagtgattctccaaacacttcagtaggcctgtagactcctgtgaagccgagccctaagattatccaacgagccaactgcttcagaccaaggatggtcccttgaccctcagtccaggatgcatgcctcatgcccttctgacacgtaatggtgaaggagtcacatgactatctccaagctgtcttttgtgggagtgatactttagtggttgctaatatttcttaagtaggatgataagaaaagcttgtgggctggtgagatggctcagcgggtaagagcactgactgctcttccgaaagtcctgagttcaaatcccagcaaccacatggtggctcacaaccatctgtaatgagatcttctggtgtgtctgaagacagctacaatgtacttatgtataataataaatacatctttaaaaaaaagagaaaagtttggataatgccatctacctgtaaatgtaaatcatggttttaactgcctgaagcttgcatagttagaaattattactcaaaaatgtcttagctgctgatacttaaaatataaaatatatttattttatcattacactatctttagaggcatctgcctttagtcagctcatcattcctaagtctacagcacaaacaagaatgccaggcacagaggggcaggggaatttactttcctttgcaaatgcagttgctttgtctaatttttctggtcacctagcaacggggaatgggtaaagtgtttcaagatgcatctcaagtcacacatgtgcacatgcatgatggccttacaatatttcctgggtggaccagagaatattcattagatgaagattgtccctgggtacaatcagaaagaaaaatcaccctgccttcagcgatggagatgcagcttagtgtagagcacttgctttgtacagatgaagctctgagtttgatccccaacactgaatgtcactggatgtggtggcatatactgttgtcccaggcctcaaagaggtagaagaggagggatcagaagttaaggtcacctgggacacatgagaccttatctcaaagtgtgtttgtatgtgtgcttgaatgtgttcacactataatttgaataaacatttttccaaggacaagacacagatgaccagaaaggggagggggggggggggagatgctgaacattacagagcatgagggaaaatccaccaatcacagcactgaccacctatgtgacaaaacagagagaatataacaagattgacaggatatagagaaatcaaaagattcatactttgctggtgggaatataacagtccttcatacccaaggttcctgcccacaaatgtccaaaacaaagttacttgtaacagcaaacagccacagaaacaacccagacgtccatcacctgataggtaaaagcaatgcaagagccatactatcttttgactgtgaagtttcatgtgatacaaaaggctgcatattatatggttctgtttgcctgaaattcccaggttacgatctatagagactagaagccatggccaggggcatgtgggggatgggagggtgtggactcactactgaccactgtgtgaggtttcatagaagacaactgtagaggaagtgtgtagtggtgagcatagaacatgctgataatatattaaaagcattgaactgaaaaaaatgtgataactctggtatattacttaaagcctatatcgctggtacgtcatccctaaaactgctaggaaacaaatctgctgcagtcttctttgctgggatcagtgcaagagctgggggtgttgctctgtggtagaggggtgatttggtgtatgcacagccctgggttccgagcacatctggactgacagtgtcactcagtgaacaggactcaggcagtgctgggagctgagccaggacctcgtgtaccctgagcatggactcaggtgctaaataaactacagtctccgctccaaactagatttcctaaaatctagcatatttttactttactccttgtccctaactgtggtggggtttttttgtttgttttcatcttgtgggcaacaaggtggctcagggggttaaagacacctgatgtacaaggatctgcacggaatttgatccctaaaactcacagaaggtgagtggcaagagctaaggccacagagttgtcctctgactttcatacatgtgtcttgccctactaatgattattattctgttgttgtaagtgattattgtgctattaaatgtcacttataaatattctacatatcattataattactattagtagggtcatttaaaacctcacttttatattatatataaatattatatatgatacatacatattatacacacacatgcatacatatatacatatatataaaacataattattaatgttagggtcatttcaagccttgctttgtatgccaaacccaagttcttttcccccttcaagctcataatctacataagaaattttcaagatgagagcctggcagcctcatgttgtgatatgttcctgaaatcccagcactttggaggcagaagtaaaaagatccagaattcctggccaggctgcctcatagtgagatcttgtctttaaaagtaaaataataaaataacaacaacaataataaatttaaatgagaaagagagagacagacaggtacagacagacaggccctagtgactgattcttaacagcataaagtgtctggtctggcctatccatttgagagttagctgttttgtagtctacttaaagcggggaaatgaggatgcctaagactaggaaagtctccgggaagaagcggctgcttccagtgttatactctatgggtttctgtcctgtgatttcttttttcccagccattttatcattaaatcaggaaagaaatgtggatatctttggcagccagatggggataggacagggcagatgttggtctcacagcacagtgaccagggtttgacatataaaaatgcaggtttctagttcaagttgagtttcagataaataaatttgcttaagtatgcctgtgcaatattttagacataattacactaacaaaatccatacattctttagctacagttcaagtttaatttggtgtcctgtatttttttctggtaacccaggtttttgtttttggcttaatctccccagcatgggttctagttctggctccagcactaaggagttgtgcatcagggcgcatggttgtgctaccccgggctcagttcccccatcacagataaagactttggattatttggattaagctgatcttccgagttccctcaagtttttttttttttttttttttaactcttatgctttgataatgcggctgctagataactatatcctaatttaattggaaacagaagatagcaatatgaaccctgccctcctcagcaaatctgagtaaataccaaggcatggcagttggaataagtgaggaaaaccgaactttattctttggctttggcttaaaaacaaatcaaaacttaatcctaatgaaaaatgtaaattaataccaggaacacactgaatatttaaaaaacagctctgcgtgtccaaagaagggggaagggtgactgaaaaatccttattgccaaaatctggcttactccttttccttaaactggagggggcggggaggccaagtattttggacctctgccaccaaaccacaggcagttctctgatttgcactgcattttggatgcctgacaagactcggtgaaaacaagtgctatttgttttcctgtgcctagtatttaactggaaatcaaaaggctaaatttccaatcagttgttaagcagccccagatgtgagctcagggccgcactggggggagtcagcctaataaggcgcatgcgccacctaacaggacacatgcgcagctgttacctttccaagccaagcaatgtgtaaccgagggttagtgtgtccaaaaatgctctgggaataactcagtcaagcttgcatgtggaggagggaacttaaaaataaacaaattgaaaaaactcctgggttctatggttttgcattaaaaaacaaaatctttctaacatcctttggcagctctgccccatacttgagagcccacaaagttagcaaaccttctatgatgtccttcgtatgaactgttcaccgattcagcatccgttttttctgcccgagtgcttgaggaaaatgacccagggattgacagggaagggtgagtcacctacgttcagagagctttctaccgctcgctcgcagagctagctagaaaattgggagttgaggttcagtgtaaaaatgtaccgttgtttagatcccagaagttggagaaaatgagacttgccctcttgcctgtgcagacgaggtagcagcttccgggaggtggactctgaggagcatgtaggcagatggcttagggaactgtaaacaaacggagcttcccaccaggctagaggtgtcacccctgtgtcctagggacctgactgcaccattcagtgaagtctttccccaaataaattctctcttgaaggcagattaaataaacacttccagattcgtggtggttcttttcagtatctctggccgaatgactcactgtgtcccgaggagattccaagtggttgtgtaccatgcgtttcttctcaagaggccgcttatctgttggttttgtggcttgtccctcagagatgtaattatatggggattgagcctttcaggagctggggtcagtcaactaccatatttcctagaattgagtttctgcccctttgtggtaagagagcctctcctaaatgtcactgtggcacttagaacgttggagagagtccagtttcagctggtaaacctggtccagagagggcttgtagaagcttttgtcctgacaggttggggagggtggtgactgcagcgtagatgagtggcccagagccctggtttgccctcttgtagtttcctaagcgagacatcctgtccaggaggactcacccagtgtggacttttcctggctctacttggtgtgttgtgtcatgtctgtgtgtaggcacggccccagccctgtgaaggcctcgctttcattcaacaaattgaggttaaacaaacttgagtacactgaacagaagattggttttccttgcatagtccaaggaggttctttagagctctggaataaagctaatctggtgacgtaatgcatctgcccttcccaggcaccggcattgatgtcaaaggttaatctctggggctgtgggtaacatagtggacaacctccggagagctatttggtaagaaaaaatgagtgttttgttaagggaagttacagaatgttttattttcatataatgagaggagaggaaaaactctcccaggaggctctgggatgctgatgtgaaacttttaggctgtgcctgggtgcagatggtgatgttgtgggacagctcccaaagctacctcacaacccgtttcagggaatggctgcagcatggctcagctcctttctgggtacacacaaactgtccactttgcttgagacaatgtaggttttgcatctccgatccttgtcatctagttttctggcttagaaatcatcttatcgtgggatagaatctgtatcttaatctctgcttttgccattactcctgggtggtttggagtccctggtgcagatcagggttagggttagggttagggttagggttagggttatgaactgtgagtgatcccgtggtggacgtggtcagcagggtaccctttggattgtgagtgatagcccaagccggagctcatgcacctgccacctacagcccacagaaatgatagctcacttgctatctcttgcccctttatctttatcttttgagaaaggttggcattgctttgatctgtgaacacaggcagaagaaatccctttctagacgtttgcataagaaggctcagcttctgctccactgagcaacaaactgtgggtgatgaacgttaaggtctgtcttgaagccctcatgatgtgtttggaggccatgcatgcatgagtgtagttaataaaaatgaaagagtgtgtatcgggggctggatgcttcaaagtacttacatacattactccgtttgtaatctctgtaacaagtctgttatgtaggtgccattgctattattatcataaaactatttggctgtatgatgcagttcttaaagataaatttcacgtaggtatcatttatcattactttagatgaggaaatgagacagggaggttgacaagtgtgtggaccaactgttgctggatggtggttataacacataaaggggcaggaaattgactgagtatgtgcaacagcactcccccgaatactgaactgggggccttgttggggaaagctacgctgccggacctgaaggcaaaacaatgctgtcattggtaactcccttgtctagcatggggccacaaatggctatcccaagattagggcctcagaatggaacttcagagcaaactgggacaccaggtaagcaaaggcctcattttaacaatgcctgttgtaaatgacttgggaactgaggtataggccctgtggcattccactcagccgagggtttgtcaattgtttcgttgaccccttccccaagtacacttttcctctgggctcctggttggactgtttttggatcagctccatggcctgccttgcttaattagtacacatatacccttagcacctcagggaccatttcatcaccaagcttaaatgtgcttagttcaactttcttagctttggcagaggacaccgtcctggttgtctgctgagacttgattataaactgaaaactgggggaaaggggcataaaactccaacttggaagttcccaaaggacaccagccagtgtgcctggcttacggccccttctccaatgcttctccccaaggagatgtcctttaggctctctattccttagccattcttgggtttggttgcccagtgggccagaacgtacagcccatttctcccagggcttgcatcagcaattcaccgaaactgtatcagccagagtttcggagacgtagacctggcaggggatttacagaaggagagctattgcaaggaactagcttgcaccgtggtggagacaggcaaggattgtgctctcccctttttgcatctctcaaaccttgtataaatatccgacccaaccttggcagacctgtgggcagactccctcacccgaggaagatggcctttgcaggatcccatgtggaaggggcatggtttcggggagcccagcagttttgatctgtgcttattcttcgctacactgtatgatacatttcatttaatggctcagagctcctttcttcagttgtcaaccataaagacacagactccacgtaggatctatttagcaagaattcatgtccaggctgtgtgactgttttcctcccagtgttgagctgctatggggcctggggttggaggagcttggccctaccacacagggacagcctgttcagtgcctgacaggggctctcggttctgtcctcagccttgctgcctaccctggggcctggggaggtcctccagtttcttggaactgttatttcctgtcatgtaatagatgactagcatgaacaggaagatctctataaagggcattcgaagaccctatctgctgtctggcttttgtaaaattcatttcacgtccttgaacttggcttgacacattggatgtaaaggaaaaaatagccatccatagtgagaggttcctagaagtataaatggagggcctgtacagcttgaggggtgtggtaggtaatagtaacaaggtcaacagccaacagtgcctcctcaagattcccccaggtgaccctcctcctcctcgccctcttcctcctcctgctcttctatctcctcttccactatcaccttcccccctccactcctctttctcctcctctctttgctaatgttttttgtttttttttttttttttttctgaagagcaccctttaggagatcaatgtgctttgaaatgacactcaaatgactcttgttgttgtttgtgacagggtcttactgagtagtcctggctagcccagaacttactatatagatcaggccggtcccaaattcatggagatctacttgtgtctgccttccatgtgctgggattaaaggcaccagtcaccaagcctggcaagttccttttaatatcatgggacaatagaagatgggggaaggagctcagaaatccaggctgttgtaaggcccaggtacatctcctgctagcctggggtggggtgggaggatgctgggctgagcctgatcttcaaactggggttgagaggttttgcttctccttgtagccagccatgcttcctcatgtccacctccattcttgtgctgttcctgtgagttagcacatcactctctcaatggcttaagtccaggtttgtgcatgccagtgtccagtgtgctatgcacagcatgtgggatatgaagaacacagagcagtctccatcctccaacatcttacatgtccggaaaaattaaaacatcccaagatgggcatgacgaatgctttgagaaaaattaatagtcaagtgtgttctaagtcattttattggaataaagtaacctggtttgggttagaaaataaaaacacccaagaatcgaaaaaaaaaaaaatccagttatatgaatttgcatttcctgaacccatgattggcacgtgctgtaatcatatggctcacaaatgttgtacatggacatggaagttattatttctttagaataatccctttcaaaacagcatcaaatcatgacatatgttaatataaaacatgtttcagattgaatttcacatcacgggactttgagggaaatagtcgaatacagtcctcttggggattgggtagaacccgtgactttcttatttcagaaggaagggttcagtcagtcctcactcgaggtaaatctttcaggacctgaaaggttttgcctttcctgggctctgcacatcccagtgtaatctccctgatacctttctgtggaggcatgagatacctgggccaatttgcagatcctgctttggcacagagctgattccaggggggggggtctcctttttcatatctgcccactaccccctgggactgagctagccaattctggcatggcaggcatttctgaaatatctgtttccctctttctgtttccttgagggtgctgtttccttgggggcgctgaaagtgaagaggcatagagaaaggaaaggggtagcggggcagggtagaggccaagaagctcatctctactgtgcggattctccaccatgagtcatgcaaacaggcaaaggtggctgtgtgaggtgagcagccccgagggcctgtaatccaaatagctgatagcccaggctctagtgcatcaggattgagctggaggggatttggggggggggggtgcacaagtgtgatgattcctggaacagcttttcctgtgaggtctcagctggcttttcttcatctctgtggagctgtggtttcacttattttgcaagaaccacttctttctaaacgtgcaagatgatggtcccatccacgatgtggctgttctttctcctttttgggctttttttttttcttcttcaccaatgtaagacgagattcctacttggtcaaagagcagtcttgttcaaacttctgatctccacatgcccactatttttaagaatacacacacacacacacacacacacacacacacatcatgcacactcacaaaaaacaaaaccatggggacatgggaggtagatacagtttaattcatgtgcaaaattattgaagaatgtgtaataaataaaaccaataccaaagatgatttgcaggcctggtgatgtaacttagtggcagagtgctagtctagtctacaaaaatccctggcttcaatctccagcaccatgaaaacaaattagtaaataagatttgtatctctggcctagaccaatgttcctggggatgcattagagttgtgaaatctatattttggcttatttctgcctgacatacattggtctgaagattatacttggggagttcctatcttggagtgtccttttatcactgatttgtgttctgagtctaagaatcagatgggtgattgtacatcaccagcctgtaagtgcattctttccctagggtcatattggaagaagatgatctgctagaaatcaaacttgaactatgtataattttaagtataaataaataaaaatataactaattcacccaaccaaatatttaaacatgtaatgcttaataaaaaaattcacagggtatttttctgtaaaaatcaaaaacataaaacccccaaaccttcaaactctggtatgtatcttttatcttcaatgtgggttgatttagcaacattcagattctcattagtgatgtccagtcagtggttgtcctattgaataatttatgaatgggagtcaagatagccttcccagactccctgacattcacagtacattgaaacattggctcctgtttctctgctcctaaatatgtcctcagaattttccttagcacaaaacttgtggcaggcacagccagccaattgaattccaaggtgcattctatcagacacttactgtcttattggtcctcttcacatcccaactgcttgggatgtgtcccggcaccacatgggtgagcattccaggctccagaggaagagatgagagatgggcagagtaaatggatacatcttgtggggtttagaatgtaatggatacaatagaaaagatacacaaagaacagagtaaattgatacatcctatggggtttggaaagtgatggatacaatagaaatgatacacagaaatggcacacaaggaaatatggaggacccagaactgccagtgtggcatgctgttggttgtgtggcaggtttaagtgagactgcattctgagggtgatatgtgaatgaacttgaaaaaggggatgtgagagggaagggcaagacctgatggtctccggtggtctgctgagacctgaatgtgtatctggggtgctcacctgaaggtgggtggggatggggtggaatcaagaaacggaaggatgggactagaagaggcattgagcagctgcagcactggccacagcagagctcccctcctcttcccccactgaagactgaatggatttggggagtgtatgttgacctgctgagatcaatgcaaacatgaagcagcacatttccaggaagactctgtagagtctcccaaggatcggccttcgctccgacctgtgagctcacttcaaggcatatgtgagtccgcttaggatttgaagagttaagctggaacacaggtgtggaaacaaaaggctggatgccttctctgctttttcttttttcatgtacttttggatgaggttattgaatcttatccagaaaaaataataaacttggctcttgtagccttgccgtaagttcttgtaataaaactcccaacattggcagatagagtaatgttctgctcttaaaaaaaaaaaaaaaaaaaaaaaaaagtctggtagcataacttgaatttaaaaataccaatgttgtgcacagttcaagcaggaaagaacattctggtgaggaagggactcaggtgcaccccagcttccctgggttggttagaccacaaaacacttagtgattgtcccttcaacagacccttgctaagagtcgagatccttggagctcagtgtttggtgcattcccacaggaagacatctgtcatgtcagggaatgtcaggggttgggttttaattagaaagtaggaggaaagttcagtgggtggagacacagagctgctaagtatgccttagtaattggtttttagctagagttattaggtgagaaatcaaatcattagtttgaaagcctagttgagagtcattttctgggagagaaggcagggaagcaagaagcactggccactggggtgaaagtggtctttcctgtaagtgacatcaagaagggtcccatcaaccagcaatcatgaaccctgccttgcaccacgcagtgagccagctagcaaaattcacaatggacacttgcttccttggccctccggctttctgtgtcaagggaagatggcaggtgtgtcagtgtgtaggagctgttattgaggcaaggaatgggcaggaggtcctgaggagagcagggagcctggaaggcctcacagagaaaggcatgggaggtaaggagcctgctggccaggtgaggcggccacagcagagtgatccaggcagggaagaaggagagaaggcccaggatggagtcgtttgttctgcagcagtgattggttctttaggctgaattcagggcatgtgggagagtggtgtgaaatggaggtggagggtcagagatgcctcttccccagctatgtgccacattaagatgcttacctgatctgtattattgcacggttgcactttaggaagggaacacgggtgaaggaacgggattgggtactttatttttctctttttaattacaaagagaaggagcaggacaaaggaccctgaacagagatggagtaaaaaggaagtctctgttattccatccaactgtaaattcctgtgctcaaccattcattcttttgaaacaatttcacattatttattgtagaataccaagaaacatgattaatctctgctctttatgtctgtcacacatctcctaaaagctttggtgtccccaaagtgatatcttgctgtgttaatgtgatagctggtaactgggtggcctcaagttgggagctggttgccgtgggaaccagctgctagctcagaggctgggccatccagcatctctcccacagctgagaaaggaaatagacttagacctcatctccattgaccatggatttgattcagtctgacccacccattcaaagaacccttgagtcttgcctcagtgttcagagtcagtactggtagtgatttgacaaccgtgctgtctgggggtgccgaggacgtcaagaatattgtcctgaagtatgagcatgtgacaaaagttaagtaaaggtttgcattaccaaagaacaaggaatgaactctctgacttggtaggcatgactcagatcagcaaaccaaaggggaattttaggggaagaaagagagccgggagggaggggcgggtaggaggggggagactggagagatagctcagcagttaacagcactgactgttctcccagaggtcctgagttcaattcccagcaaccacatagtggctcacaaccatctgtaatgggatccgatgccctcttctggtgtgtctgaagacagctacagtgtactcataaataaaataaatctgaaagagagagagagagagagagagagagaggaagagcaagcgcgcagggctcgagagatggcttgtcaagtaagggcaccgggatccactcagtggaggatgataactggcttctacaagttgtcttctgacctccggatgtgtttcatgccacatgtgcctacacacacacacacacacacacacacacacacacacacacacaaacacacaagcatgaacgtcatcattttggaatgaaggaagaaagggaggaaggagaagggaagagaagggggaagaaggtaaaggaaagggaagggaagggaaagggggaaaaggaaagggaaaggggaaaaagggaaagnnnnnnnnnnnnnnnnnnnnnnnnnnnnnnnnnnnnnnnnnnnnnnnnnnnnnnnnnnnnnnnnnnnnnnnnnnnnnnnnnnnnnnnnnnnnnnnnnnnnnnnnnnnnnnnnnnnnnnnnnnnnnnnnnnnnnnnnnnnnnnnnnnnnnnnnnnnnnnnnnnnnnnnnnnnnnnaggaaaggaaaggaaaggaaaggaaaggaaaggaaaggaaaggaaaggaaaggaaaggaaaggaaaatttatcatggctgtgcgtgcagggctctttctggaggagttggaacagaagcccactgtgactggcgacacaagcctcgtgcataggtgccaagggagactattattctctctggggattctttctctatggaaatcatagtcatttttagtcctgaggattatgggggccacccgtgagcaacatctcctacaactccatcatggctgggagggcctttgcagggcctgtgaagctagtggttgaggggagagcgctgactaaccactttcgaaagcagaaaatttccattgacctgtagtcagggacacctccctgcccctggcagctccccttcctccttattggaatgtgcctgaggagtggcggtaactgcgtttcgtttccaaattcctcagctctgagtttatgaaccttggggctgcctggagagaagactgcactggggcagggttgctggtgtgtggcagggactaacccctgagtgagcctcnnnnnnnnnnnnnnnnnnnnnnnnnnnnnnnnnnnnnnnnnnnnnnnnnnnnnnnnnnnnnccccctcccccccacccccggtcacatcacatggctctttaatggcttcaggctgcatcccgtactacgactgactcctatttacactcttctaaccctcggaatgtaccaatatgatgcgtctcttcattcactttgctttgcataatgtatttaaaacccaaagttaaactgtacagctataacatgcaaaaggacacaagcaacaaacacggagggatccttgcctccacagcagaacgatgctggcggtgggtcaaggcctgctctgcactgccgtgggttttgttcttttggtgacaagctgaataaaaatatttaagttcttttcagaagcgagaagattttactgcagggcaaaagtcacaaaacctggtgaggctggtttggggttctgtgttgaggcatggctgcacccccaacagtgatgcctaggggtggcatggttactgtgaggctggaaggtggctttgacatgaatacacaacatcaaaaccaggtcagagctagggcttccacactggcttctcttaagcagcccgaggaccattacgagccaccattacctgtgatgtgaaaggcacgaggttgtgcctgacacatagtggatggacagccgatgtccatttaggacatggtttttacccagtttattaatgattagtttcgtgcttcccaaaccagtacagaccataaaggcttccttaaatgttaagaacccacagggccctctgagatggctcaagagggtaggtgcctgttactaagcctgacaacctctcaagttgtcctctgacctcaatacacacccagggacatacatgcacaaagtatataaatattgaaacaaaaaaagagtgaaacctgatatatatcataaaatggggtagttaggggttcatactggggaatggagcagatatttgggtactaatgacacttggtaatgtcgagtaatgacagttggtcattactccattatcactgccacaggcttcccagtgtcttcagcaagtttgctaagattcagtgtcatggcaacttggataattctttgttggagcagctccatacatcgtaggatggctaggagagatgccagtatcacctccccctcctggttatgagaataaatattatttcttgacagtcattgcttaatgcccccttggggaatagaatgatccctggctgagagtcactggtagagagccatctgcaaggtactcacaatgggtctatgcttgccttccacgctatggaacactcagcgaggtgtttcctaacaagaccaagcagggtcacccagagatgctgggcccactggaaagtctagtaagtctgggtgtttggatagttagcagctccttaggcactttctgcttcagtcatgacaaagatgatggcacatgcctgtaattctagcccttggcaggctaaagtggggagatcaagagttcagagctagcaagatcagtctcaaaaacaaacaacttttatgtgggtatatatatatatatatatatatatatatatacacacatatatatgtatgtatatatatatacccacatacacacacatatgtatgtatgtgtgtgtgtgtgtgtgtgtgtatatatatatatatatatatatatatgattgtgtaaaatattgtatagaaagtgttagtgcatatcacagcagctgagtgagcaccaggctactcacgtgaagaggagaaatgcagttatatgtgagggaaccacttaacaaagtcccagccctcatctagccttttgttctgaggttcattgttactgtgtggctatttagagcctcttgagtaataacttgttttttgctaagaacaaatagttaatatgaagtttaatgtatggtgtgtatagttttgagactcatgagcattgttaactactttgggttttcacattggcattgataaaaactaatcagtttacaaatactagccggctcctcctttttatgtgttactacttacacaccatgctgtgcaaggccagggatggcctgaatataccacaacactgtgacatttgcacagacatccttgcaagttttcttgggattcgtttgacaggctcttgacctcacggttcctgtggggatctggaagttaactaaatgagctgttatccacattcttcctcctgctgagaaacctgaaattgagagacctgtagaaaattggacaccttggccgttctttatcttaatgctcaggaaaacacaaaccagttgcgaatagttctcactcgatctgttgtggtgactgttggcagaatttacagcttatggaagccatgttcagttgctcatcagactttgagatcattgctctgaccctgaagccaatttgcacacttagtaacacttcctctgtgacatccaactcagcacagtactgtcttctgacacaatttattcacgtgacattggttccaggactacctccctgtaccaaaatctacagatatttgtgtctctcacaaaatggtgtagtgtttgcatgtaagctacacacacattcccctgaagactttaaattattcctgggttacagatagcacccaatctagaatacatactgtgcaaagagtacttactgattaggaaatgacatagctaaaaacttttaaagtccatgtttgtcaagagaggtgctgtgtttcccttaaatgtccagttctagacacggctctggtatccatatgtgttgaagagaggtactgtgttcctggtcagtccacagacatggcaacatataaacagagactatccagtactcagaagtttgatctttaatggaagtcttcttggggttacctggaagaagtgggcttgggattgcttgattcagctcttagggagcttgcctctgccacatctgcctgcatgtcagagagaagaaacaaattaggtatgatggtgaagtctagctagggctccctctaagtctggtttgactctgggtaactgtgtcatattaactataagttctatttgttccaggtttcggagggttctgtggtccagttttcatcaggaaacttctccttgacagcagaaacagaggaaaggagtttccctcaagaaaatgagcatctgctacactgggcccaaaaggaatatggagcagtgacttcattcaccgaacttaagatagcaagaaatatctatattaaagtgggagaaggtaaatgttgcatggcttctgttaatgatgttaatgtttataactgttggttgtttacctttctgagtccaggtgctcagagccaggcatggtaggattccagagtcctggaactggcggagacctaggagatggcatgagaactcttctcctacaccacctccttgtttttccttctgcaggagtggggctggttataaccagctgagaggtagggagcagtgtagctgagaggaaaggagttgttgtgtaggatttagaacgcagtcaaccacagaattcagagtaagcaagtggctaagtgtcggagagggaacagcagtgccaagggatgcactgaaggaggcaggatgggttagacagtgggggcagcttcttacctgtgatcctgcaaatgttttaggccagtgtcccttcctgacattcagagatcagttaaattttagtcattaacagaggggaaagtattcaagtacatttttagtgctaatgcttgctacaaggacaagttcctgataaaaggaactacatgctttgggtaagagacagaccattttaagttctgtgccttgcagaaaggtaaaatttccaacaactcaattttgaaagcctgtttgctaaaagcattttaaaatcagttttagttgggaatatttgggactccacccaccttcaaaagtcaacgggacctgctgacatcagctgtgtaaatagtactgctcttctgctgctcccttgaatctgacagtcggctgtcacttcttccctagatgtcatgcgggggttaggggcttttgaatgcttggtcccccatcttgggtctgggctggttgaaagtaaaaatgggccatcattggtgtgtaaaggtgagtcactattgatgtgtaaaggtaagccaccattggtgtgtaaagtaagccaccattggtgtgtaaatggtgagtcaccattggtgtgttgactacatgcagatacatatcaggagttgtcacatgtccaagaagggggcattgtttctgttattctatacagagtttaggggaggggtaagtgggtgtactctgatccacattactagaaagtgggagagccggttctcaactgtagacttcctcactcctgtgtctaacgctgtgacctgatgttgtgcttaaagtcttagcctcgtaagcacatgcccagaatgaaagtgagctgctgatcagaacgtgcccactgacctgaggagggttttagaggagaatggggtttgaacagcctaagtttgttcctagattcttgtggtagtcaggcctcatcgtgccaaagagatttttaaacatatcttaataaaggctgtaagccaagcaccctgtctttctgaagcagaatctagtagcatgaagggatggagggataacagttcttggattgttagaacaaggaaatttggggtggaagcatgtggaatgttggaccctgtttccttgacagtgtgtatagcacagatgtcacctgcccctaggatctgcaacactcaagtaaccgagctccaccgagaagaagcacaagtaaaacatctgatgcccagtcaagtaaaaactggtcggctccttgagtatccctagcatcccctaaaacttgactccagccatcagttgggtccaagtcactggtccatgtcacagaagggaacagtctcggggagagaggaacactactgttctgttcaacttgtagaccccgaacaacgttaacaacgatcaccttgcatcagggtgactgattagctttccaaatagggaccctagccacgagtgtctccttgctcaaaccgcactggttctgagagtgtgacgaccgaccgtgtcaggaacatcactgttactgagcaccttgttggaaataccatctgtggctcagtcctggccagctaaattagaaacggggatggggtcagcaaagtgtgtttccatgagccatccaggtgctggtacttactatcgacagagtgaaggagcggagtgaaagctgctggctctaatctgagcaccatgtcttagagcataggccttcacggcaggaaatggagcctttgcatgacttccaaggctcattgctgctctcaccatccctaccaagcttaagaggtttctacctgcagatcacctgcctgtggttccctttctacttggcacttggtataagtttttacaccaaccatgtggaaaggcacttgagctgagagactccgtgccataaaatgtgatcagctccttcagcttggttgcagtggcatgtgggactggaacccttaataatcacagcttttagacagttaaactttcccgagcagctcaccaacctggggaaatctttgtctatttgtctcaaattttacatcgtcgttagtggactcaagaagcctatacggtgtgtctattatgtgccagctgcatgctgggtgcacctgggtaggaactgcaagccacagtcccaggagggtcctagtctcttgagtcttctggcccatatacatctcctgattctcaattagatttcagccctgcagcctgatatcattttctgtcttgtgaactgggtgggggttgggggaggcatcacagggctgcagctgtgaagtacacattcttcatctgcacatctggaaaagcccttagcagatgtggaggagggccgctccaaagcctgaattgttaagctgtgggctgtttccttggaggaggtttgcaaaaaagaatgcagggtgcttgagccaatgctctcttgcagcaatcacacaagcaggggccatattaactactgtagtgccgcctgctctgaggtgctctggggatattgcagtggttggagctgcggtgccagagtgtgagttgtgcagggttggggagggcagtgtcagcccagccttagaatcttaaaagctcatcccctgtttttaggtgaggcttccatgtggaggtgaacccccagcaccccgtcgttaaaatttaaaagacacaagcctgtctcaccaaaatgccaggtctggttcattccccttctgaaaatctggcttcccctaaaacttcctggacaccggtcccagttgtcactgtgccagcaacttcactcgggttctgcttaaacatttaagccacaagatggaaatcccatcaggtgtagtgctctgtaaacagcatgtgtcacgggggagtgtcttcagagtcttggggctgggatatcttttcccttgtggaagtggtgagcagtcctcaggcagtggtatttataaaagcaccgtgaaagtgggaaaaagatctgcgggccagagaaccaatagctacttgtatcaaagctgcaagtgcccaaggagaagcctataggattaaaaatggattcaatgttgccagtgctcatgaaaatactggctaggtcgggaccttctggtagacagatgacagtcttaagtctgcagcccaggggaggagctgtggtctaggcgcacaggagtgagtgaggttatctatagaaaatagacaaagggaggattgagattctgagtcttgattatttagcctaacataggtttccagctgcatacatttccctgtatatgccatgatgtcatttttttttctcatagctgtatatctttgttgctgttttgttttttgagataaggtctgtagtccaggctgccctcagacttgctatgtagctaaggatgcttgtaaatttctaattttcctcgcttccacctcctgagtgctgagattacaggtgtacgctgcagaaccttttacacgatactgaatatggaccccagggcatattgcacgctaggcaaacatgttaccaacggatctacactccccagctcagggctgggagtcttgggcttggctgacattaactacagagcctcagaaaggaaagatgtccgtgtcccacatgatcccctgaatcagattctgagggacagagtcctaagaggtggttctgtcctggatcaaagacagaggaccactctagtgaaaaagagtaggacacagcaggggtcagaggagatgaacaggggcaagaaaggagtgggtgtaggcaaagaagaagccactagcactggccagcagaaggcccctggtagccaaggtagaaggcatggctgagcagtagccgaggccacagatgaggaccctttgggctcgtggcttctggttcagacttagcctcggtcacactaccacctctttccttccctcctggtcccataaactccccgatttgaccccagtgccctgtctttactttcagatcaagtgttccctcccacgtgtaacatagggaaaaattttctctcgctcaattaccttgcggagtaccttcaacccaaagccgccgaaggttgtgtcctggccagtcagccccacgagaaggaagtgcatatcattgagttaatctcccccaactccaatccttacaggtgagcacgcctgtgcactcaagtgcacccatgtctgcatgtatgtacatgtgtgtgtgcgtatgtgtgtgttataacctgagaagagatgaaagtaaagatctgttctcccctgatatgagggtgagagcggggagcagctcactttatttggagagagggaagcagccatgcttcaggcaggcgtggatcacagaagaggaggacggcactcagcatggtgacgtggtttgcattatcacctggttgtaaagatatatatgccagagagttcttgaagccccttcttaacttctgggtttaatttttaagataatggttctcctttgctatctcctttgacggacatcatcactgttgaaacagtgatgtaattagagttacagagtagccttattatctaccacagttaccattttaatatgcctcttttgattcggttatatgtataatatcctcagagtacgtatgcaccgtgtgtctgtgtgtctgtgtgtctatgtgtctgtgtgtgtctgtgtctatgtctatgtgcgtgtgtactgcatcttcatggtatgaatcaaggatccattaaatagatatcacaatctgacacttgtggaagtttgattctccctatgaaaataattagattttgttgttgtttttaaggaggggaaaaataataattttctaccctgacctgtatttcatatgggccagtgactcaaactttaccagtttttctgtagagagatttttgaaatgagacgtgtaatagagttttcatttcaaaattgaatagaccacagatcgtttgggtgagaatctgttccatgccatgtacagaactctgtggagggacctggagagtgcgcagaccttcagccaggctttctgatcattgtgtctcacacttgaaaccacgacagacccttccctcaaattcggaacgtttagtaaagcgttcatttagtaaaaaccattttctctcatgctcagttcttagaagtttgtattgtgctcatcaattttgtatcaattgcttgcttgaccactaatttaaataactttatatacagaagcttgggaaagtaagtgcagatatgattatttaactgttactgatgccgtaatcaaaacttacgtaagtcaagaggcctttggccttttatttattctgacatttcctggagcatgtgctagcatgcctcctaccccttccctcctccagcctcagccacccacatcaggctttgaagggcttcagcatatagggacttagaagttccacaacaaagggcgaaggcacagaaccttgaacacagacaattctgcttcagaaggaaactcccttggtgttcaaatccctttaactgaggaagcattgaggagccttcctccctccccctctctagaggagaaacacagctaattagcatcaggcctgcgatcctattgttatgtaaacccgttttgttcagcgtgcaacagcaatctgttttgcacatgtcatttgcctgggatccacgccagcattttaatcaactggccagacactggaaacacgaggcttggagcagtggcagccttctggctccggtcttgactttgcctttggttttcacacacagcaccttccaggtggatataataattgacatacgacctgctcgagaggatcctgaggtggtcaaaaacctcgtcctgatcttgaagtgcaaaaaatctgtcaactgggtgatcaagtcttttgacgtcaagggaaacttgaaagttattgtaagttggttgctcatttcttggtcttgttaaacagcaataacttaaactgtggttgtgtgtgttatttttgcaaaggttctgcctctttgaactttctaagctctctgttagttttcactctgcagcctatacttggtttcttctgctggacagtcaatgtcatggctaaaacatggccctagggaacattgtggacttgggtttgagtcttggctctattacttaaaaattatggccttggacaagttcttaaagctctctgaactccagttacctcattatgaaagttctgacatgagttagtgtactttctagtcttagtaaacatgaagcaatgaacattttcatgtctgcatattctttagggggtcagtgtcacagtctggaaccaggtgcatagggaggaaggaaaaccaagctgaccccagcccatgctgtagacttccctgttgagataaatatgtgatgttgggtgaatctggcttgcatccaacttccaggagtaatactctgacagaaaagtaactctgggctctgtgtgtatatggagggggtggggagtgagggtggcatgggatgggatgggatgggatgggatgggatgggatgggatgggatgggggttggtactcactcagtaaatgactttatcctgcaagctgtaatcccagggctggagtgtggaagacaaaagaaccctgtgagctcagttgctgtccattcagcctagctggcttggtgagctcctggttcagtgagagaagcagataaagattcaagaaaacacctgatgttgacttcccacctccacaaacacatatgtgcaccctgctcacacacatgtatatgcactacacatgatcctttcatggtaaccagcttacctctaacatagcttcccaaagcttctgtgaggggccttgcaggctgacaggctaaggcaaaggttcatgttgaaaagttgatgaaagtttggtaaaaccaagctcatctcagatataattagggggaaaaaacaacccgatttggcataatattggagcaaagtgtggtgtgtgtgtgtgtgtgtgtgtgtgagagagagagagagagagagagagagagatctccttggcatctcttttgtaagagtcaaatttttaatgtgtgttaattgaccatctttgttaacagctaaaatggattgtagatgtttggaatttaggagagtcgagttgtgttggttcagcattcctctgcccactgcaccttccatgtgatctctgtccttttgctcacagcaccttccatgtgatcagcagtgagcaaaaccaacagttccctacaagtccagtcacttaggtgagctcccagaggagcagacaaagccaggagcacatcttaatttaaaatgctttttccttgttcctagggatttttatattattattattattaatttacttcgactttgaaacagtccaaataatccatcaaatgtagtagtgatgcatgaggctggtactgagtgcaaagccttgccgtgattttccaaggtcacagatattttgattgccttcccttggcatggcgtaaggggtggtggcgacctggagtgtctgctgcctttgctgcctggcacgccggccaactgtttttagtttcagaataacaaaaacaggaaagggaatcatgccttgaaaggcagaaaacatgcggtgcactttaactccctgctggagtttgtatgtacttagctctgactggcggctctgctgtccctgcatgcacgtgcctggaccacagtggtcctgggctttgcttgaatgtccctgtctgtcagaggaatcagagagactaagaaagacgaggaataagatcggccatcatcccaaacaagatctgtttatattcctctctctggctgcactcctgttccaggccagtcctggacaatacatgacaacattgctaaacaattaggtaatgtttcatgatgatcttttattccccagtcagtttcaggctctttgacttctaactccctgtcccagatgtgagctgtgctatgaggaacaggtacatgctaagacaaaagtttaggttgcagcttaggaagagagaaatggtcttccctttacagacaatatggttacatgtgaagagtaaaggactctgactcaaccacacaaagctagattcaggtaccatctccagctgccagttcatggcggacagtacgactgaacatggtgtaactgtgaaatgggacagtgacagcactcactcattgtggggtttagctaagctcattcaaccacccagcaagtacttgttaagggcatatggggtctttttaaagcacacaggtacatggagcattctcagctccgtgtgttacccagtctgtgcatcacagcttctttctcactagtggagcaatggtagaacctagctcctgtattaaaggaagactaacttaggaaaatacatgtgaaggtctatcacagacctgttgtacaaagactcacctttcttccataagcactcccttgaagaatttgtccacaggaaactcaaagggcttcattaaccaaggtgaaaacaggagagctaccaaagttcataagaccctgaaagagtaatgccagcagcacacccgcatggctgtgtgtgggtttgttagaggcacagcataggcggcagtgggaagtgatcagagagataggaaggctatgcaacaagatcagcagcaacactgcagtgtggctctggccccttccgcaggtcctccctgtggacgtggcccagtcacttctacagcagggagaacctcagaacagaaaagaggaggaggcttcttagaggcttcctcttatgggccagagagatggctaagtgggtaaaggcacctgctgcctaatctaaggaccagagctttgtccctggtatgcacttggtggaaggagagggccagctcctgcaaatggtccttcaagctccacatgtgcacacacacacacacacaaggatgaaatcataataaacttaaaagctaagttttctcttgtattctttgatggagcctactcttagaaacgatgctagtttaaaggcccagtgtgcagatcctcagcacactattctccgttaagcccttctcttcaccattgtttcaaaggcatgggggtgggggggggggaggaagagcccctttccccaccaacccagctactagttcacaaaatggggctgaagataatggtggtggtattaggggaaacgtcctttgagcacccccttagctgcactacgttgggaaagtctggagagtcctaggaacacagaaatgagggatttactcaatgctgagaaccagcttgcctcccgtcatcctgctgctctcctagtgcagagtgatgtctgatcttttcagttccaagccacaattaacgtgaatcacacagacagctcctgtgtttaatgtggaaaggcgtgaagagattattctgtcctggtgcagcagaacaggtggccattgcgatgatgagattctggaaatacggtattttctcagctgtctgacaacatgaaagtctagggcagatgaggccaggcagtattgtttaggccaaggttgcggttccagccagtcaaaacacatgctgctttgaagggctgggagatgctgcacctcagcaggctggctgagtgaagctctgagagctgctggctcttactacttcagccccgattcctctttatctcattccattttcaatcccatttccctctctctccctcccccttctccctatctctttctttctcttcttttctttcgctctctccctttctctctccctttccttcgcctacagccctctctttccttctctcccttcctctctccctctctcttcccttctctctctcttcttcttctccttcttcctttaggagtttcctctgaatgtgagtaagagctaatgcctgtcggtctataacctggcttacagatggtggcaggattcagttctcactcccttttctttgcatgcatatgcaaagtcgtgactggccagtcatggcaggttggtccctagatcagctctttgggtaacaggagaagattttgggtgacacattgaagttttgacttggagtaaaagtgtccgcagccaatctcccacaacacggaggccaagagaactgagagcccgtgaatcttttacgactctacagtgggaaaggattaatatttggtcatgtttggggtaaatagaatgggaaacaaatgaggaatttaggaaaaatgctacagacacgcaggagaaaatcagtgggcatggaaattaaagggacgttgatgtggcgtgacagtggtataatctgtgctctggacatgccccagccctgttggagcagttgtgggcactgtgccttcccatcgggtctctctgcagtgaccagcctcctcactcatcaacaggatccctgacacaggagtcagcaggggacatagacatttgctgcctgtatctcggctagtcagaggccagtcatatacttccttgaaagaatcctttcattttagtgttgtaacagattattaatgaaaactaacctttaatatggctttaacaatttccatattgttatagaggggccatatcaatcgttacatcctttcagttttaatatgcatgttgcctgtgtaagcatataagggcttcctcctttattactaaatacaatgctactacctgggtgatatcttaatagtactccacagcataaaatatagtatattaacaaaattggcaagtgaatacaatttcagaacacctaatcagtcagatgacatgtaaaggtttgaggtttactatgtggaagctaatagttcatacagcattgggagagtcatgtgatcatgccatcttccctgtagatctaggccacaagatgcaaagccacaggcatgtttgtaaacacggtgtgcacacctgtgtactctacagacagttttacataaaaaaagcggaagggaacatttgaaatgtgtacttgttgtcctagtaacggacataaagtaagtactcagtgagaatgggcctctcttcgtgtgcagtgttttatcttagtgtcttcttatccgaggaagacagaggttacagggtaaagcctccttgtgcagtccagaatctgttggtttcagataattcctcattcaaagtatctttttagaatatcctttattctttgacaactttatacaatgtatcttgatagtgaccacccccaattcccccttccctcatggacacctgtaaaatatccttttccaccttccaaggtccccctttcatttttgtaactctctgagtctgatcttgctgaggtctgctgcgatccttcctcatcgtggtttgaccttgtgcagatcttggaccggcacttttaattttagactcatgggtaaaatgttgctgtctttaggctcctgacagtattggctttggaaaagagagtgaacgatccatgacagtgaccaaattggtaagaaatgacatcccttccacccaagagaatctgatgaagtgggcattggacaatggctacagcccagtgacgtcatacaccatagctcctgtggccaatagatttcatcttcggcttgagaacaacggtaagtgtgatgtttcccacctgttggcttctgtcttccagaggaagctgctcagtgagggactctcatttccatgtatatgttgctggcttcctgctatccgtctttataatctgtcggtttcaccgtgaagcttaaactaatgtattggaggcaacggtaacacacattctcagggatggagagctgcttgtgtgtcagacatttttgctctctgtgtccactgtgataacatcaggacgctaagtgaccgctcacagctgacaacaccaaggggtaggtccatagcaaagaagcctgacaagaggctgaagcttacaggaaagtgaccacggggctcagactgggtaggtttcattcagcctgtggaggcagaattgtctctcggtttctagagtcttaaagcgggtatgatttgaacctcaagttttctgagaccttggtgtgttcctcaccccatggtacacgggctgagctgcagctgtaggttcacttcccacttagtatttctttactattaggggagacgttgcttaatctccaaacccgagcctcagattccctgtcaataaatcaagggaaggaaaagatctgtcttgctggcaaactgctatgaaggattggagggggggccggggatgtttttgtttaaatcaatgtctatgttaaaagcagtccaaaactgtgacttcatgtggacccagatagccatagcatccttttcaaagggatcctgtggaaggagagtccccgtctacagatcatctctatctcacactgaggggggtgtgatcctaagcataggtcagctgggctcagataatagtggaggcggagaacactgggagaacaactagttctgtaagttattgaaaatgtgacagcaatatgcattgcttttacagaattctgtcttccttctgaagcgctctgctccccagagacagtgttcagagagaccagggtacctgcacagcgcccagatttttatcagtcagaaaggaggtgacaaataacagagcagcgtcactgtcatagaggaaccacccagtatgctgaggaacctgggcctgatcctctgaactacaagataaaatttaaaaatagcaatatagtttctagaaatcttctggaaaaaaaaagatttttaaaaccctagattcaaagaaagtattttaagggcctttgactaagttgttactgcccctcatcgcacagatacatagtttgtagggacttagaaactatctagcagaatgagtctctttggtgatggagcgtcctgatcacactagaagcttaaaacattaagaactggagttccacgtgtacccaaagttgaggatcactgatatactccaaactcttaattttaaaacttgggaaactgagtcacagagaagtaagtcacctgtctggggccattcagctagttagaacagcgggatcagaattcagggttccatgtttcttagttagttctatacattgctcatttactgtaactttgattttcacccattctgtgctaattcctgttctgtctctaacaatgaccatgactgacatcagtcactcatgatgttctcacaatgaccgtgaccgacaccagtcactcatgatggcttgccctgtctttcccagaggagatgagagatgaggaagtccacaccattcctcctgagcttcggatcctgctgggccctgaccacctgcctgccctggacagcccatccttccaaggggaaatcccaaatggaggtttccccttcccattcccggatatccccaggagaggctggaaggagggagaagataggatcccccggccaaaggaacccatcattcccagagttcaattgcttccagaccacagagagccagaagaagtgcaagggggcgtgaatatcgccctgtcagtcaaatgtgacaatgaaaagatggtggtagctgtagacaaagattctttccaggtcagtgcagtctcttaaaggaaagacgtgaagctttccccagctagctgcaactctgcatttattatttccctgtagttattttacttttgaatctccgtatggtgatgttttcccagttggataggccactttcccttggcaagggccttcattcacttcctgttgttctcaaaagaggaggggagttcagatccttgtatgtcaatattttgctattaaaatttcagtgccaataaacacaatctgttgttgacaggtgcaaggtgaagaaaaggcttgatattcccaggagaggctgcccagatgaaaaggggaggggggcgatgaaaaggcgagagggggaggggcgagatgcctgcctgcctgaggcctcagcctttgagacaggcactgcttgtaaccccaatacagtgaacagtggttaagccctcaggtaacctttggtgctttccatttcagaccaatggctactcggggatggagctcaccctgttggatccttcctgcaaagccaagatgaatggtacccactttgtactggagtctccgctgaatggctgtggtactagacataggaggtcagccccagatggtgtggtttactataactctgtgagtattctctagaacaaagccttacctttgtcacggcattgctgggtattatcgagggttagccgctgaaaatgactgggatggagataaagccagatgtcagttctcaacaaaaggagatggactgtaaccctgaactcttgtcttgttatgatttatcagtgtatgcttgggatttgaaggtcctgttttctcagctggagttgtgataatctcacacacttccttcttccatataatgatggttcaacagcagggtggttacaccagagggtccttatggggttaaagccccaaagccctagggtacatgaacatcccccagtggatagtctcttgcttgtccaagagtaagaagagacttctttcctcatgagcctaagatcaaaaaggaatcctgataaaattatccagtctctctaataaagaccccagatttaagaaaatttattttttaaatctaactggaagaaggttcaattttccccaaaaaataattggttgcagtcaccgactcttccctccgggaaattactcctgccagttcacctgaatcttatcaagtgaggcctgtcctcttcagggagggagactgaagcacaaaaccccacagatgtttcaaagtgtccgttttgcagatcgatttttaaatacttctcagcacgccacccacaatcaccgcgtgaaccttgggcagcgtgtgtttccgtgagctcttagctcgattccaccactgacatgggccagctctctaagctgctggttcatatgacctcccatcaccacatttgacccaacccagaagagcagccggagaggcgtttgcccagtgtgtcacagggctctcctgtcagcttgctgtattgttcctgagacccttagacagttggcccaggaaagaggggcaacatgatttcactcagtcgcctcatttcaaaggcaaagaaactgagccctggagagttctgaggcttggtcaaaattgaggggctggttataccggagagccaggaccaactcttcccagccccacacccaccgacgtttcctcaacaccagactggcttatgttccttgactcatctcttaacttttgcatcctactcatcacgacactaattttcttgtgattatccagtttctctaaatagacaagtgccatgcaatagcaatgcacttgatatggacgttttaaactgattccaaattagcactggcaagaaggtgatctagtgagttaaatcttcaattgccccaagagaaaggatatctggtccaaaaagtcacttctttcttgtttgcttttcttttcttgtcctttttttttcggggggggggagggggttcgagacagggtttctctgtatagccctggctgtcctggaactcactttgtagaccaggctggcctcgaactcagaaatccgcctgcctctgcctcccgagtgctgggattaaaggcatgcaccatcacacccggcttcttcttgtcctttttttttaaaaaaaaaagatttatttattgttatatgtaagtacactgtagctgccttcagacacatcagaagagggcatcagatctcattgtggatggttgtgagccaccatgtggttgttgggaattgaactcaggacctttggaaaagcagtcagtgctcttacccgctgagccatctcaccagcccttgtcttttttaaggacaaggcattcagtcctccagcacccatgagtgcatcaggtgccttcctagttactcccccacccttaccccattctgctcccagtggtgagtgcttcaactgcctgctccagttgtgacagtttgtaggaatcttcggactccctatgtatttctgttttccattatgctcataattcaagcatacgaaatggaaataaactaggttgtgatttgcagaattgttgtattcaggtcaccctctccatcctatttacatgcaacccagtacagtaattccagccaatgtgaagacagattgctgtgaagagaacgtcttctttttttgcacccatacacacaggaaagatattgggaaggattgatcaaagagctgtgtgtcccctgtcttctagattgtggtgcaggctccatcccctggggatagcagtggctggccagacggctacgaagatttggagtcgggtgataatggatttcctggagacacagatgaaggagaaactgcccccctgagccgtgctggagtggtagtggtatgtgttagtctcccgtagatggttctgtggatacattgttgctcaagctggtgtggtggtggtggtggtcctacatgttggtctcccttagatggttctgtggatacattgttgctcaagctgggctggtggtaggtattggtctcccttagaccactctgtggataacattgttgtccatttggtttgtttcactgggaagtatcaaacctaaaattgcagtggctacgcctttaattccagcacttgggaggcagaggcaggcgaatctcttagttcaaggccagcctggtctacagtgtgagttccagcacagctagggctatacagagaaaccctgtctcaaacaacaacaacaaacaacaaaacaaaacaaaataaaacctaaaattacatgttaaaggctcttcatgtgactgatgtgtccttatctgttggctgttttccagtttaactgcagcttgcggcagctgaggagtcccagtggcttccaggaccagctcgatggaaatgctaccttcaacatggagctgtataacacagacctctttctggtgccctccccaggggtcttctctgtggcagagaatgagcatgtatatgttgaggtgaggttggtgtgttatcctcgggtgtctggcccactaccctacgcagcagtgccctggcggctagtgccctatgcaggtcatgtgacattagcatgagcacctggcacaggtctcaccttgtttactttgacatctaagtaacagtttggctcagaaaaggcttccaggtcattttctaactaaaaaagattttatgaattatgctaaatggatgtagtggtttttagtaaatgtcaaaaagaaaataatgagcaaagtgtgaactgtatcagtaaagagtggtgcttgttctgacatcaacactttggggatagttgtttagccatatccatggactcttctaaaacaccttacatattatcttggacttccaagttaaaaggtgtgctctcctgaaaatcacttctgccaagtcattttcttaatagacgcatgaatttgtcaaaataattttccacctggaatggtggtcttcgtgcatagcttaaacctagaatgcctatgaaaataatagacagtggtggtaataatgaaataacaacagctaacatttattaccattttaccatgcagtggatctgtcatgactataatcacaatgaactgacttgctagagggactctgtaaaaatggattaattaagatccaacttttgtatgagaaaatcagacacaaggcggtccaacatgacacctgtgcctggtatattacttccttctggggtcctttctctagagtctgtgctgttgacagccaggtgctgctgttgtcattgccaccccctctcaaattgccacttgaaagagaataagacataacttcatgtctaagttctcagactccattctggaaaagacaaacctatgtttcaggttgtttgctgcccgtgtgccctgagcatcatctgtagggtgacaaaactggtctgctggtctcactgtaaggcatcatgactgctttgcacctcacagggggagagtgagaagggatagaaatggcagactcccagaagtgaaaatcaccacagagcacctatgtctgttttgcaaagacagtgcgccatgtgcattggcactgggttggagtggagccaggcagccctccctgttttcttcagtcatatcagtcagtccctctgcactcagctccctgttgttagcgccctggaggaagccatgttttgtgtgtgctattcctaagcctgcatctctcctgatccaagcttcctattttcttctgccttttccatattcacagtccacaagggtcttagtcagcaactcccactgatgagaggacactgcttaactgcattttgctgttttttagacagatgcctacatctgctctttggtggctttatgatttatgctagccagtggctaatctgcctgtgtgccccaccctaaatattttcatttcttttttcacccctggaatgctggcttactccatgaagccagtagattccctctcctcccttccatttttttgtttgtttttttttctttttgttcttgatttcttttttacattatttcatatcgcacatgtttttgtagttaaatttgattttaaaagtagaccaatttttttttttcttactgctatcttaaatatcaagttaagaaagatctggggctgggtgagttgttataaactattttaaacttgattgaaactaccaaaaataagaaaaagaatctgtaaatgttttgttaaataggataccagttgaccatgccttgtctttctttcctggtttggactctgctgctggtaggaaaattttttacttaagtaaaataaaacttcataaatcttggcttaacctgaagagccatttcttggtttattctccagctgccctctgtagcttttcctggaaccttccgttccctctggatcacagttccttccattaatccatgatcttctcccctttgcccctattctcgggtcactcctgggtgatggccggtgatatgatgacagctttcttttcagttcctttggcttagtgatgagcatctagagccagtcatgggagttcctactgctgaacctgagctgtttgcatgcaccttgatttcagtgtttcttacaccaactgtatcttttacactcattacggccatcatcctctaggagagagcactgcatccctggtatgcacaggagcagcagagcatgtgacttccttggtctggtcccattctaaagccaacactcttcctactgttcacttcaagtccactctacagcaagacttgctaatattttcctcctcaaaagcacccataaggaaatctagacagcggttctcaaccttcctaatctgcagccctttactacagtgcctcatgttgtggttaccccaaccataaaattatttcattgctatttcacaacttaattttgccactattatgaatcataaagcaaatgcctgatatgcaggatatctgatatgtaacccctataaaaaagggtcattcaaccccccaaagggtgtgcaacccaccggttaagagtcactgatctagacagccattctgtattgcatgtctttgaaagtaagacaagaatcaacatatgtgtgcactgtaagcttagtttatggtaaatggcactttttatttgcagcatgtatataatttaccaccttaacaggatagaacatcttgttcagcagaaataactcaaggatagtgaaagtgattatttacagagggtcgaacaagatggcaacattgtaattacctccaccttctgctcatgctcatgcgaataccccatagttaccaatgtgggatcttttgcgagcactatgaattaaaagttcctgcaatgtcaggagattctcctgggaagactccaaatgctaagtttattatctctctatcttttaaagcatttaggggctcttggtggatgggtaaggactaactttatttctaaagtgtctacgtttattgtttatgtttagcttagtcaaggaaagaggcatcggagttggaagagtagtccacatagcaagtcgtgccaccaaacagtggagccagttttgttccagggttttttagcagagttcaggatagctaaggtttgagttgtgcttacatttggctaagcactacttcttgtttctgaacaaaggaaccttagtgagatctggacatgatgcacagaagtgatttgtaaaaaggaagaataaatgacttggaaatgtgtctaggttagttttccatgaagcaacctcccccccacctacctcctccgcaaggctaggttggtcctatgaacagctgggacactttgccaggttggtgatagccactaaatcacactgtccctgatataagaaaccagaggcctgcttactgaccaagcaggatacatctgtggctttctgctcttctaagttcactctgctttcttgcacagtcatcctaggtcacatggattctcctctgtcctgaactatttggcagcatttaaaaattgagccttggtaataatctactatcgtgatattaggggctttatctgtgttttgcttattttgaaaaatccacttaggtgcaaggtttgcttttattttcctttatctctaaggacttgtggaagctcagagaaactctccccatcttgcaacttgtagggtagcatttgaattaagcaatttgctgtcattatgtcaagtttaaatggacggtacctttcatcaatcggtgtatgttactattagagttaggaagttctagatgttattaaatagaacgatgtctcatccaaagaactgtggcaggatattgtccgagtgactaatgtaaaataagaagccagcccatttctgacctgacctttatgctcctctgcaggtgtctgtcactaaggctgaccaagatctgggatttgccatccaaacctgctttatctctccatactcaaacccagacagaatgtctgattacaccatcatcgagaacatctgtccgaaggatgactctgtgaagttctacagctccaagagagtgcacttccccatcccacatgctgaagtggacaagaagcggttcagctttgtgttcaagtccgtgttcaacacctccctgctcttcctgcactgcgagctgacgctgtgctctaggaagaagggctcccagaagctgccaaaggtgcgtgggctctcatctgtccggactgtgattcgggcatgtctgggtaaagaggttgaggttttagttctgaggttctgaagacttccgtttgaagcatcagtgtgagcagggagccgtgtgctttagttagggttttggagaacaaattctgaaagtttgtctttccatgtgtgctgaattgtgccttatgagtgatcaatcaggactgtttttcaccaagggagaggcctggatctggctctgttggtcagataagcacgccgtgccagaaggacagccaactgaaaggacaagaccagtgtgaggattaatttttccaggtcccatggagaccgggattgcggttgtttttgtgaccttctctgtgtgagtgatggggttgctcctctcaggaggacgtgtaggggaaattagtaaatattttacttttgccggtttcttatcagttcatcttgtgtgcctcctgccattgcccatattaaacggctatgttctgttgccataacagaaatcagacccctttgacctcgctggagccaccgcaggggttctgtcaggcctgcctgtgtgggacaggtttctcctgctgtcacttcatttctgtggcctgagataattacatataatgtcctccagtgtgtttgttcagtagctgttatacacagtctaagctggagtcttctcttctcatcgtgggtccgctgatgtctgggaagcacagaatcaagctgtagcatttatatgtatggcgtcctcacattcagggaccggaagaaaaagcaggagtgaacatcactactgttaaatagatttctattgacctgaattccttgactcatttccctgagcagttactgatttgagcgctgtctacaaataaacgcacaccagatcacccatcaccaggaaacacttgcaaaggcccagactctgcttcttctggagccactgctgggcagaagagcaaaggagacaggagatacatgtagtaggcaggtagcgagagaaccattaatgcttccttctgctgaaaggcagaatttccctatctctagtaactcccaaagtacttctgtgacaatagaaaaggcccaagaaccttctaggaaaaggtgtcgatgatctccaaatctagctgctctttgctgtgaattacgtgtctggccgaggatcagactccaagttagcattatatgttcttatttaactagagggctatccagagagcaagaggaaaatacagtcgtgaaatgaactgcatatcttttcaacaacgtgccttgacacagaaaatacagatatagttttcctctacaagaaaactcttttcagggagtttcctccctctgttcgttttggggtaatgatagggctggaatgtcttcttgtgtgtggcccagaggtgatggctcctgtctagatttctgattagtttcaggacttaaaatatctagaaactgctggtctcagcttacacacctaggcgtcactccctccctaggacctaagttaagcacagtcaaccccaggctaagccatggatatggtgaactgataaaatattcactgagcatgtgtgagggactggattaaatctctagcaccaagaataaaaaataagccaaatcaaaataacaaaaagggaaagaaatgctgtgggaagcctaatgttgtagagtgaaaaaaaaatatccaacaaccatgacagtgtgcgtggttatattagaaatataaatcctatcattgtataacactttaagtgcagttccccacagctacagatcatgggtgttatcacaaaccacttatacaaagccactatggtacagagccaaaaaaccactcctgcagttctccaattgacagactaattcagaaatatctagctcttttgtggccaaggggcaaggaagatgtttgtaagctgtccattggtagttgcatcttccagtgtagctgaaaatacactgggcctgtcgtgatagctccctggttatttaaggttctttgaaaagcacaccgatggcctgtttttcccatggttcatagccgtgagctgtctgataaggggccagaggacaatcgtctgcaggcctggggagggtacttctttctgagccatgactgccttgctctgcctctccacagtgtgtgactcctgacgacgcctgcacctctctagatgccaccatgatctggaccatgatgcagaataagaagacattcaccaagcccctggccgtggtcctccaagtagattataaaggtaagcatggtggcctatggcgtgtcttgtaaagattccctagaacatacatggtgaggaagatgaataactcctgcaagcttcctctgaccttcactagcacgctgtgacacttgcatggtatgacacatatacactttcccaagttgtcctctgacatccatccacacgtgttctgtggcacacacacacatacacacacacactttatagtgaacaaataaatgtaaaaaaaaaaaaattaagctaagttaaacgccagttggtagctttagaaaagaattctttgccccaagagattttccttagctgattctgtccctgtggctactttgtaacttatttacagattgtttattccttagagaatagctcaagggaccagagaaagggcttagtggaggagtctaggtagcatgcagaagattctaatggccactaaagtatcaggtcaaggtaaaggttggctctgccctgttactctccgctacactcagatgtgcttctgtgagtccatggcgtgctggggcctgcacactattcacagtccagctttccacactcatgattctactggctccaagctgccatacccttgagaggggctgtgacctgtgagcattgtccatttagggatactggcagaaagaaagttgacatttataaatgacttttcagaaccttgtacaagagcaaatgctggtcctccttacacctccggtttctgtccctttatgtataagaacacccaccatgctgtgccgaatagaagaggaggtgaaatgtgtggtgtgagcaccctaaggaaaggtgggggcagacctctagcagggaaccctgaggactgcggggaggataccacagcaccaggggcaggagtatgctacaatgtatcaggcagctgtcaacagctttggggtgggaccaaacgcagcagggaagatctgagtagttacaatcttccctgtctggaagcagcctgtcactctccagatgccttgctgtctaagggtgtcaagctgagaaaaggctggcagggtgagaggggatgtcaggcctccagggtaaggtatttcaggattagaatcacagaccatgtcattccatcctgaagggcagagaattgccgagcaagagccagtgaggagctcggtcccagctgctaggcattagaagggagccatgctgactggtactgacaccagatctggggtttagggcacccctaggatggcactttagggctggggtttgacaggattaagcagtgggcggttctggagcaggcatgagctaccagaaaagaggcaggtgggtgctgccagtttctcaaatgcgattgggcctttgtcaaaagagctgtgcctttccgtgtgcacattcctacagaaaggcagggagcatggggtaggactggctcacagccttgaagttgaggactctcctcttgctccctccatacccaactggctgtgacaaaaacctcacaaaccctctttctcatgttcttgtctggaaagggagcattagaacagggggcgtggaggtcagctgacctgtaaggaggagccgatttccagttcatttccgccatcctaaacgcagaacgttcatctcagatgcttatggcttttgtcctgagtgtggtttcttttactttattggttggtttctaaaaggtctggtggtctctctctaactgggctgcccagatactgctgccattttgttgcatgtaggggaaaggaatgtgagtaaattaactgtattgcaaagaactcatagttggtcaacagctagctgtgttttgtgctataaaagccattaacagcagcagccacatgttccctgtccctgtccctgtcccttacctattttgagagcactcattcagatggtaattgaacacagcaactggctgtgccctgtgccagacagtacttaggccttaatattacaacactataacttccagcaattctttcattcttttttgttaaactctggtggtatttttctaagtaatttctcttgtaaagtaggtaattacttttattcaaactcagagccattatactgaacactcagtgttttctttacataaaactctaagaggaaaggtacttttttaaaccaaatatcaaagcaatttcatgagactcgctagttgaggtgagattttagttggagaagcaagtgggtgaaccgtttattgctcaggtttgtgaaacaaattgagaagttgaacttgagcttcccaaggggctgtgtgcaaatccgtcttccttggcaggaacaggtaggttttctgctgattctcatctttatgatgatcccctcaccctgtatgattagtttcttgggctctgaaatcatttctgttccatgtagagcactgaaacctgtttcagctacacagggcattggaataacactgggaaaaggcaggagatcactggcccaatagtcctggcttatttaaaataacaacagctaatgctctttctgagagtgggccatcaggggggacctgtgggttccccagctgctttactgacctgatgctattcctgttgatgtccttgccacagagccgactatccctgcccctttgctccatctttctttactgcagttgcatttttatggaccatagatacaggcaacgtgtcaaccaccactgccgagaacagggacgtctttcaggcagtgtttcttcctcaatgggcagggcaagtggccatcaaagctacatgaataatagtaggtttttattggaaccttcgtgaaggtatcacctttggtctttaagtcctttgggatcagtgttggctgatcatcttgctacttaaaccttcagcaataggtgaagatgcttagactattaatggtggtgagggtcccacattgaatttgttttgtgctaaatgcatagggtgttacagaatttaattcttgcagcagctctgtagagagcctctctatcaaacttggacacacacctgcatatagcagaccaggattcaaacccattcttttgattttacatcttttgcaaaccttcacgtgtaatctaattcctatttttaataaaacaaacatacatctgctggtactatggggagtcacctcctcatctccaccccttccccctccactcccccatcccctcctacctccacccctcnnnnnnnnnnnnnnnnnnnnnnnnnnnnnnnnnnnnnnnnnnnnnnnnnnnnnnnnnnnnnnnnnnnnnnnnnnnnnnnnnnnnnnnnnnnnnnnnnnnnnnnnnnnnnnnnnnnnnnnnnnnnnnnnnnnnnnnnnnnnnnnnnnnnnnnnnnnnnnnnnnnnnnnnnnnnnnnnnnnnnnnnnnnnnnnnnnnnnnnnnnnnnnnnnnnnnnnnnnnnnnnnnnncatccccatgttatcaatgtagcacccgagtattctaatgagtagcagctaaatagtagatgaaaaaaattaggggtcgaaaaccccacatgatagggttaaaatgctagagtgtgtttaaaagtgcaaacccagacactctgtgactttataacttaaacacacacaaaagcagaagatacaaatagctgatgcgtattatggtttctggcaaaacaattaaaatagctgagccgctgccggtttgccatcactgctgggacatgaaagcatgttggcaggcttcccaatttgccacgatttatacccggtttttaattcttagcaaattaaacttttgaaatgttggatcttctccacattggaaaataaaagcacctgcatatcacgggctgtcagtaaatgcggagttcctgctttgctttctgccaaaccagggctctttcaggggaggagagggttttggaaagcagaggtctgtgagttggaaattgatctaaaagaggcgtgactttatggaacacttttggatttttccagaaccaaaaatactcaaaaaaaaaaaaaaagtttgtcctcaggttaagggcaagatgaggagaggaacagggaaggggcgctcaggagctggcagagccaggactcatccatctctcttcacggagggagcaggggagagaactcagcttatgccagcctcttcacattttgaaaactgctctttggaagattttaaatgtatacaaaaatggaatgtcccgccccctccccaggaacacaccacttccagctttagcaactactcatggtgaatcttgtttgacgacttcccatggcccatttcatctgtcagtcatccaagagatacctctgaaatttaagaaacatcaaaagatcttgagaagaaggctgggtatggtagcatacatctctaatctcagcacctgggaggcagaagcagacagatttctgtgagttcaaggccagccagggctacataggaaggccctgtttcagaagaggaaataagatgttgaggagagctccagtacttcgatcacttaggaactcggctctgcaagccgtgtaaatgttacgctgcgagaaagaatctggtaatagaacatgaaatgatactttgggttgtttattataaaaacatgtttactgggttcctactaagcctgtaaggtctttctagcacagtgtttctcactctgaatagcatcctccccaggctggataactcgttcaggcgcactgtagaatatttagcatcatccttcatttctacccagtagatgcccgtgcccacccccaaccaggtcgtgacaacccagtaggattctagaagtctccaagtttcaaaagagcctcccaatcccccatctccactccccacccctcacccctactcccattgtcaagtggcagagtgcagataaggtgacagaccactgccagggactccatagatactgaaaagtgcccagaggaagggtcagaatcagggaggtaaggttggtaaaaatactcttgaacaactgcacaaagtctcctcctccctggctcccctctgccagatgccagcagatgtgtgtgtgtgtgtgtgtgtgtgtgtgtgtgtgtgtgtgtgtgtgccagtttgatgctttgtttctttgtgggccttttagggcttccagtgtttagaagaactgaattaaaacgggaggccaaaagccgtgtcagttactcatgcataacccaccccaggctcgcgcattcacgaaagccctgcccaacagccggaggggggaagttttggttctagaggtaaaccaaaagttgttcagagtatatgaaaagatttgctccagaatgttgattatagtgtattctttctgcaaagaaatctactgttaaaattatctttacagcaatatctaggattcctttttaacagtcttttcccctaagcccaaagtcaatattgttacggccgacgctattttagttatactcaggggttatggggaacaagaactgttagaggataaaccctggagcctctgccctgctgtgtaggcttgtctctgcacagatagtcaagaagggacttgactcaaggaaatgaggcaggggtgtttctgtttagctctctgggagagccccctgtttggggcaaagggagagtattagatcacaccctaagtccattaagaacttttaaacaataccatccatcaggaaggccttgtcataaaacctaaatgcttacatgtgaggtctcccccggggagaatcattcttttcaaaccacttggggattctgagtgagaaagtttaaccgcaggcggaagactccatggagctcttcccagaagtgagtgtgcacacacttcttgcgtgatgcacactgctgagaccgccaaatgcctttgcgcttacttcagtgaatcaaactgctaattcctgaaagtaggtgggttttgtggttagatgcttccacttcatggagttcttacggtggaggtaaaaggagcaggatttttgtttactttatcgtactgcacaaatctataaatgttagagtgagtgttgttcgtgctgccacgaagctgatacccaggcaagtgctctaccaagtgtgctacacccccagccagaaagtgcatcgctctaaagaatgtattttattattttatatgtgggggtgtcttgcctttgtgtgtatttgtgtgccactcacctgtctgatgggctcagaggccagaagagagcatctgacccccgaaattaaagttaccaataattgtaagccactatgtgggtgctgggtatcacacccaggtcctctagaacagccagtgctcttaaccactgagtcatccctccagcccctcctaaatgcattttatagttggtacaacgagtgcaagttctgtatactgaattgtattattttccccctaaggcagtgttctagtttcatgtcttgtgcagtgataaaatatccaaacaacaacaaaaaggccacatagaagaggggagtcgtttatttagtttgtggttctagcttacagtctattccttggaagaaatcaaagcaggaacttcaagaatctagtctcaccataccaggggccaagagtagaaagaaacctctgcgcacacacttgctccatctctcttgtgcaaatttaagacccttgtctaggaataacacctcccatactggaccgagtcttcccacatcaattaatttaagatagtcctcccctcccccagacatgcttccacacctccatgtggacagcccctcagtacaactctcctccgaggtatttctgccttgtgtcacatgagcaatcaaacaccacagagtctcactatgcagcccaaactgatccaaagccaccgtgtatccaacctgtcccttaacgaacagtaatcctgcttccgccttccagggattggggttataggacgatacactatgcctggccctctgaattgattttttttaaagcgctttaattttcttggtaattgtatcaaaatgtagcacaaacgtttcctcatcgggggccaccatgatcctcactttaagggatccatacagttattgatcatttaggaattggacttggtccaactgagcttgttagccccgagaacaagcaacgatctcttttcccgatgtcaaccttattatttgtttttaatttaataaggccagcttgcataattttggtctaaactccacaaattcttttttgtcggagttgttttgctatgaatgaaaagtgtgtctttattgaatgaaggagctgaaacggagagacactgagcacagaccatgtttaaactctgaagagaaaggtggagcctgaaccacaggttcttcaccctttttctaggaaaggcagagagataatacatttggtttgggacatatccagcccttgcctcaagtgctcagatcatagggcactgtgcttatggaacaaacttgaatttcatgtaattttcacctcatgcaatattcttcttcttttgctttctttaaataaatcatttcaaattgcaatttcccatcccaggccacagtgtcggcaccctggtttaagcccatctcactgtggagagcaacaagccctgtgtaacagcagttactaagtaacagtagttactaaggcaggacttccccagctgagggcaaggacttgcactcctctgtagcctggaggcaagagtcagaaattgtggctcagcccttggccctgatgcttcccagctgtgatcttgggcaggtcacaggatatcagagtctcagaccacactcatttgtaaagtagtaattgcaaattctttctctgcctgcctcaacagggtttagcatcatataaaacctctcggatctgtggccttctacgactgcgaagctacagaattattgacgcacctaaactttttgtcatcttatttcttgtttccaccattttccaaaagggtgtcagcattttaagcacctgtcaccaggcacctctagaagtccaagtcccagcttctcctgaaggctggacaaaaagaaacgctgggaacctccacactgcctggcactctagcgtgttaggatgcagcccatgtaacaggaaagggggatgagcaatgtggagagaccagggccagcacagcaggaattagtttataagtgtaattgaatgagcctgtgcaaaccttaaagaaggaggagccaccagcgtcaggacctgggaaaggagaggagatactatgtttcattggaagcagaccgcacttgtttttctatgtatacaaaggagagtccctgggggtctcgggagttcactgtgaggggacccagtaggagaaaacatttggaatatgctgagaagagaatgaatctggtaacaccaatagcgaagccaaacctaaccgtgtggttaagtagagaagttacaacagcagtagatggtggtggtggttgtttttatgagacagggtctcactatgtggtactggctgtcctgaaaccctggtctctatgtagaccaggcttagcctcgaacacacctgcctctacctcctgagtgctaggattaaagacacctgccgctatgcccagctgaaagctgtaaattattaagagaatgtttaaaagcgggaacagtgttgtgactgtattggagatgcacggtttttgtcggtattgaacccttgtatagataatgagatgaatacatgcgcgcagtcagactcagagcccttagattcgggtgcctttggctttccttctctgtaatctctcattagcaaactacagtgcctaacttttctgagatggacttttgatatgtaaagaggaatactggtagcggtttcacaaagtatttattaagatggggctggagagatggcgcagcagttaagagagctgggtgcccttctagagaaccagaggttagcacccagcacccaagtcaggtggcccacaacttataattctagctccagggaatccaatactagcctccagtagcacccccataggattacacacacacacacaaacaaatagaaaaacgtctgctctgctgagcccgatgatcccttacgtcagtggaatgcattgtgacttatgcttttgtttcagaaaatgttccaaacatgaaggagtccagtccggttcctcctcctccacgtaagtctttatgcaactatttccaggcaaagcctctggccttttctaagaatgtgctggttcgggaagaagtcgtgccaagctgagctgataaggagtactgggcagtcctgcccacttcctcttcctttcctctcatgcgttccttttcccttcccctgtccttccttcacccccctcccttcctattcctgcggtctctaccttcgctgcatgaaaaccttaatttgctgacccactgacacatgtagccagagtgggaaggctacagcctcactttaccaagttaattatttgtgggttttttgttttttccctgtcatccaatctggagtgtttgcttcaaattctgcctgtggtggttacctgctgagaggaactcagcaccacacattcaagactatttttaggtcaagggatggagagagctagggagagtaagagcataccggtgttcagcaccattggtacagggcaatgagttgggagtcatgtaggtggttatcattttgtatattattgaagtgagtttccatggttatcattggcacagaagcaggactccaccttggcgtcttgccatccacccagagttctagatgatatgtccctgtgaggatagtctgtattgttttcttcctggagactcccaggacttgttcccattgctgaccgcaagacatacatagtattcttttctttaactttcttttttttttcttttctttatttttttaatttttattttttggtttgttgtttttttgtttttttttcaagacagggtttctctgtgtggccctggctatcctggaactcactctgtagaccaggctggcctcaaactcagagattcgcccatctctgtctcaagagtgctttatacaaatcactctttatagtacttttatagaaagccctttttatgttcttctaagtgacttatttccaggagattatggaataatggagaaccacaaactcagtaacagacccactgggcttattttcataagtgacatctctgtctttggaatttcaggatgtttttactaaaagacttaggagcacgctatctttgcatttgtaggcataaccctaaccctgatggttcagcacctctttgtatctgtcccatggactagattaagcttcgtggcctgaagggttgacctgccattgtaacttccaccaggctcttcctggtttctcgttctgtgttccttcccaggactgcctctctgtcagactgactcatcttgtgtcacctcctgcctctggtgggtggagacaccctccttattccagaatgtaaatgaacacaccagcaggcatgtagctggaagagcttgggtccttcgggacgccttccatagggcaatactaaacaaaagccttcgaatggctttgggtactcaggggccacctttgcctatggctgaatcttttgtgttggtatgagttcaaaagcgcagaggtttcatttctagagctttccgttagggttgcttctgaatggagtaaaagaagaaattgtgacacggagaaaacttgtaccttcaatttaaaaaaattacacacacactaacgtgtctgtgtgtgtatgtgtgtgtatatattaagacagacttttatcttaccaaacacttctttacaaactagtcctaactcaaagatacttagtcttgaatgaaagaaaatatccaatttctgagagctgaagtcaatttcaaacaaacaaaaaaaaaaaaccaactttgccaagtagaggaacaattagttcttttacatgttttgctgactgtaaaactgacgtggcacccacgagaagtaattttcttcacagaaagagcagagttggaaaggcgtcaaagagcaggttgtttagagcgaggctgctcatgaggattaaggctggggcttactgtgaactctgaggtgtgttctaatgcacaagaataattcattctgttctgttctcttcccctctcatctttctgactctataagtgttctcaaaaacacttcagagtccgctaaggctacggtgagcctcattgcttacaaccacccaaggaagaagcaacaaggctgattttgatagtgggaagtttacttttttttaaaagatggggtctcactgtgtagcttcggttggcctggagctcactgtatagacggggctggtcgtgaactcatcttgatctgcctgctctgtatcccgagtgccgggactaaggccgtgcactcctggttctttaccgtctaaagtattgtaacttgtgacttttcacgttaccgaggttctcagaccacagatttaaagtatcacggcatttataaatcttattttttaaaatgacattttggggggctggggaggtggctcagtgattaagagcacttgttgctcttgcagatgaccccagttgggtcccgagcaccctcacggtggcccgtacccatgcagaaccccagttctaagataggagattcaaggggcacacccatggtccgtggagattcaaggggcacacccatggtccacttaagtgtatgcaggcaaaagaatcatacaaacaaagtaaattaaataagctggaaattttttatttaaaaaatcactttgctcagaataaattgcaaacagaatatgtaaaagcccaatcaatccatcttttcctttgtcagcagatttgccagtaacaaaatatagagtttactgtaattattatctctgatcttactgtgaccgtgcttgggaagtgagaatgaagctgaagtgtgaaacagacagcttgacatcatgtatgtatctcttcccctcttctagagattttccacggcctggacacgctcaccgtgatgggcattgcgtttgcagcatttgtgatcggagcactcctgacgggggccttgtggtatatctactcccacacaggttagtgactactcactggaaactagggtgcatctgggccacacagggcacccgccacacaatagacaccagagtttttgttggacaggtgatataataagcaaaaggaagagaatatccattttcactattcttatatttatgtattttgtgttttaggtcacgtaaaaatgtaacttggtctaagtgatgcctagagaaaaaaaaatgtttaccctgcttttgttagttgcagttacagtgctggtgatattcagcttctaagacagtctaatcttgtcatagaacctaaaggagtctgggtagcatgacgaactggaactagaaaccttcgctccaaaatgaaaggccgtggaataagctgctgtgatgaaggagaccagttgctcatgaccacagctgccagggcattggataatgcccgcccttgtcctgtcctcagtcagggactccaaaccacgacctcctggcctttaactcatgacatctttcataaacaaaattctcccattttacaaagtttatatttcaaaatatatttttatgactaaaaaaaatataaaaagtgaaacaaaaaaagttaaaggtgtgctctcccacctcaccttcctgttttgatgttcttttggtgaatacagagttgccccaataatcctggcttcgacccccaaagccctaagatacagttagccatcagccttccctgaactttacataagttctgggagattctatagcccagccatcatgcttgggcagcaggcgctcatccccagctcccatgttttctgctggttgctagacagagcctcaaactcttgagaaaagtacgtgacaccagcatgcttgctagctaaaggttctgactctcttttcacttcaaatgctacacctcgtaacagttttttagatcggggcacaaacagcagcagaccttctacaccaggcctaggaagtcttctaccttgtgaaagccaacgtagtagcaaaagcttaagagagtttgataatggagctctaagtcctcaagagtcattgttcccaaccagcaactccagtgaaatgtgtttcgtgtcagagagaacgaaggcctaagtggggtggttctgagcgtcatataaatgcctatgagtcatttgaagaagttttcctcatgcaaaagttcagaaaagaacccgaagggacagcttttagcagagtagaattttggagtacttttatcacagcaatactgacatgtttagatctcaaactaatagttctttgcaactttttccagcctcctgcatggaggaggttctagggcacttggcggcctacattgtctcctgggaataaacttgaaagtactccaggaagactgtagccctgaggattttatgtggggctggtcactcgcagatgttttccatgtgtgtactcagccactggctggcttgggtcttagaaccaatcctgaaacccacatggtccgtcttgggctaggaagccaggccaggcataatagagggttaccaaatgatactcactgtggaagcaaggccccactgagatccctctgggaaccccagatttgtccaaagccaagcatcaagctgatagaggacaaagcctgggtgttgtgtcctgctcctcactgaagtcggaggtggttgtacctcaccctctgtcatccaaacaaaagccccagagggaagctgaaagtaccgttaatacaaaaataaagtttgcacacagcttagagacaagcaaaaggcccttccagcacacagtttgtgtttgtgccgactcagaaaccaaaagacctatggatgctgtcgtttggcttaggctcttgacgttgctcatgattctgctccaaagtggctcttcagtcaaagttgtggcccccagctaatcttaggcacagctacaattaatcttagtaccaaataaacacaaagagggctcagtccagagcccagttagtctctgacgtggatcaaccagcagaaagtttagatgaacagggatggtcagaatgctgtggccagcaagcagagccgggcatccaaacaccgactcagtcctttaatttccacaataagctaactgtggaactcagaccttatatggtatatttgggggttcaggctgctctgcctctgtgtcgggaacaaccctttgtttggatgactccctctgctcacgttctccagcctttccacagcacaccccaagtcacagatttgaatcttgacacatgttcctggaataacttttagtctgaaaagatagggttcccactctgtcttattgcaactccgggtacaatgagataactgcctttgggctctattaattctgtttggagatccctattttaaaaccctgtctcactgtgaacagaggagagatggttgggggtaggtgtggttctggtccaaggtttctgtgacacaggtcccagagtcacaggtgtgttgacatctgtagtttcctggagcataagagctctgtgtttgctttgtagaaaaacctttttagcctcatcaataaagtgcgtgagagtgtgacacctgaacgaggtactgggacagccagacccacccccannnnnnnnnnnnnnnnnnnnnnnnnnnnnnnnnnnnnnnnnnnnnnnnnnnnnnnnnnnnnnnnnnnnnnnnnnnnnnnnnnnnnnnnnnnnnnnnnnnnnnnnnnnnnnnnnnnnnnnnnnnnnnnnnnnnnnnnnnnnnnnnnnnnnnnnnnnnnnnnnnnnnnnnnnnnnnnnnnnnnnnnnnnnnnnnnnnnnnnnnnnnnnnnnncacacacacacatacacacatacacatacacaccacacacatacacacacatacacacacacacacatatatatacatctctaagtaacacaagtatacggctgcctctttttgcttgggatcctctctgttaacatcctactgcagaaaacaactgtttatctctgctttacctaggtgtcccaattatccatttcccttcttagcccctagcagggtggttctcagccttcctgatgctgtgaccctttactacagctcctcatgctgtggtgacccccagccttaaaattattttcgttgctacttcataactgcaattttactactgttacaaatcatagtgtaaatatctgatatgcagggtatctggcctgcaaccctgggacagggtcattcgacccacaggttgagaactgctactgccctggtagaaccacaccgaaatcttagttggatacacattgtcttagttagagttttactgctgtgaacaaacaccatgaccaaggcaggtcttataaaaaacaacatttaattggggctggcttacaggttcagaggttcagtccattatcatcaaggtgggagcatggcagtatccaggcaggcatggtgtaggaggagctaagagttctacgtcttcatccaaaggctgctagtggaagactgacttccaggcaactagggtgaggattttatactcacacccacagtgacacacccattccaaccaggtcacacctattccaacaaggccacaccttcagatggtgccactccctagtccaaggatatacaaaccatcacacatattcactgtttctgcagtgatgaccacacacacacacacacacacacacacacacacacacgcgcgcgcgcgcgccgatcacaatttagccattcagtatgatagctctattacctctcccccaagtgtttaggtttttccaaagataagcagcatttctctgtatcccatctcccactagcttagttttctaggcatttatcgtcagtttgtctactgactgccagctgttatgacctcctctctcacacacacacacacacacacacacacacaccaatgccatccattttctttcacaagagtacttcacagagcccaggtacggctcccagcatctatgcccagcagctactcacacgcataggctcactctcctcctccactcttaaaaataaaacgatttttaagccagctggacctgtccaacttgtccccctgcaaactgtctcttttgcctccagtctggagttttccagcgcttttctttgggtcagggatgccttaggccatgcatcccacgccttccttcttcttggtttaaaggggacatgggagatacatgttccctttatgccatgagtctgaaatatccccgctttataaaaacacttgcttgacaaacatggtatcctctgttaggttataaacgatcccttggagttttgaaagtgcccctcgtgtttttctctggctcaaggcttgctgctgagggtttgaggctgcttagatttatctttctaattctctctacctgtgacctgtctttcctttctggaatcatctttataataataacagcccttgatttaggggcattttcatattttgtgctgggaattaattgggctttcagcctaaaaaacccatccattgttccttccgtccctctttcttaattggtgtgtgtgtgtggtgtgtatgtgtatgtgtgtatgtgtgtgtgtgtatgtgtgtatgtggtgtatatatatgtgtgtgtgtgtatgtgtgtgtatgtgnnnnnnnnnnnnnnnnnnnntgtgtggtgtgtgtgtgtggtgtgtgtgtgtgtgtagggtgatatagagtatctcagcacagcctatgttggctttgaactcactatgtggtccaaactggcctcaaacttgtggtcttcctgtcttagactcctaagtgctaaggtgacaggcatgtgtcagtcagtttttcttttctctgtcctttctcacccctgtttcctgtattctctcactatatgaattatttgaaagatgaacctaaccagccctctgcttcgtctctttcagttacctagaatcctgccttgattttttttaattctaagaactataattttcctttcctttgtttgtttgtttgtttttaaaagttctcctctccccttgtgcctgggttatctatctgaaaataatacaggagtagttatgaatgtggaggctgtggccatgcaaaattccgtagggtgtgttgaggggctgttttatggatggatgagttccagggtcacccctgcatctttcctctgagctcatcggatttttcctgaaacagaccttcctgtttcctacctgcacagtataggtcttgcctaaaaaaaaaaaaaaaaaaaaaagagtattaataaaaagtgctgacatagcaacatgggaaaagaaatactcaaacttccagggcagggcacagtactgacacttttcctacttttcctgagtgtggataatcaaatacgtgtcatgttccagaggaaacaaacatgtgggctgtcatgagaagaccgaggccactctgcttcagtaggtgtgaggctgagctcgtcatcagctaagcccaagtgtgtcatacctcctcagcagcaccttgaactcagctgtggtgtcttggactgagcgtttctagtaccctcaaggtcaccctcttcaaagaatgcatgacctctttttcctggataatgacaggcaggttccagtcttgcaagggacagaggaaactcaggggagccatattgcttctagtgcagcagtgggatctactccactagagtatgaagaccctaggcacctcctctttcttcgttgtctggcgtctgagtcgcctacgcctttgaaccctctatgacaggtttatacctttatactttatatattgaggcagggtctcttccttgcacgcagagctcacagattcatctagtccagatagccagcctgcagcctgctccagggtccatttacaaacaggttccctgatggattctcttgcacggaaccaaagtcagaaagagtaatagggtaataggttagtgtgactgtccacctcagggcacgccccgctattttgagtatgggcactctctctagcgctctctctctctctctctctctccctctctctctctctctctctctcccccccctccctccctccctctctgcctctctctctgtctctctttttctctgtgtctgtctgtctgtgtgtgtgtgtgtgtgtgtgtgtgtgtgtgtgtgtgtgtgtgtctctctgtgtctctgtctctctctctccagggttttacattagcaagacaagagcttccaagactctgaaagttatgagagctttttctaatgggcattaaaatcgctgacacagcaaagagacacttcccaggaagcaaatctccagacttcctgggcaggacacactgttgacatttttcctgagctttgactcatcaagcattgtcctgttctggaagagataaacatgagcgtgctgccccggaggagcagggccgtcctgcctcatccactagacccagagctcacaaggccagcagagcccaaagggatgggaggaacctccctttagaccagtgtgccagtgacttaaaaggggagaggttgttctttttagtgaggctcagagataaaggatttaactcagagtatttacctagccaagtccaaggcctctagctctggataaacaaacaaacaaataagcaagcttatgtatggccaccatagccttctaatgggctacaggaggattcaactgagaatgaattaacatgtgaatggtaaagtggtgtgtgtgtgtgtgtgtgtgtgtgtgtgtgtgtgtatgtatgtgtgtgtgagtgtgtgtccaagaggagttgggggaggggtgagtatgatcaaaaattgcctgaaattctcagagttaataaaaaatattctaaaatatcatcatatgaaaaagnnnnnnnnnnnnnnnnnnnntggtgtgtgtgtgtgtgtgtgtatgtgtgtgtgtgtgtatgtatgtgtgtgtgtgtgtgtgtgtgtgtgtgtgtgtatgtatgtgtgtgtgtgtgtgtgtgtgtgtgtttatgtatgtatgtatgtgtgtgtgtgtgtgtgtgtacatcagaatagttagttaagggctggaaatatatgggaatataaactcaggtagggcctatcatatccaaggccctgggttcaaacacagaagggacaggggaggtaaacagagggagagggggaaggaagaaaaaagactggattattttctagaaatgatctcccatttatgagtcagtgaatttttggcaggatgttacttctcccccgtggttacatacacatttgaagggggcggtgctgaggaagatccaaaatcctgcaggggagaagacactgtgacttgcctgctccttgggaatactgatgtcttcctttctccccctccaatcccagaagaaaaaataattagagccagccaaatgcatgcaatggccccaggtgctctgaggtgcatgcagaagcccgcggagctgtgtcagggaaagctgaaacctgacccggggagccggagccggtgctgccttttgcagaactgcatttggcagagatctttgaggggccccaggaaggcagtggaagtataggcctctggttcctgagctggttcagaggtcagagcctgtgctagctgctgcagtgttgtgttttaatgaagcagaagggagggttgcttatctctggctgatagatgtgtatttcagtatgacaggaaagagagggcctaactcataaacagacctggcctgctgggggcttcccacgtcggtgggggtgcggacagctaagggggcattggggcagcagctcccacctctctcctctacctagagtctttttttttttttaaaggccagtttcacagaagggactagctaaccatagggcctctcacacagttaaatgcaaaccatgtgtgacccgagctttcctcactctccagagcattgcacacttggcacaaagagcgggtggagctgtaatgcagcggggtgtgtaatgacaagtggggcatttaatgtgtcaggagatgctcacactgaactcaacagagagcctcaaatgcaaagaggtgctttgctggcaaccagtgcaggtcccatgtgtttgagttctttgccccaaagggttttcccttggcagtgaccccagccccctctcctctcagccccctcagcccccttcctagtagtacttctctggtgggtttcatgctgggcatacaaagctgttttgctgtggccagggcaagctctcaaagtcactagcggggcggggcggggcgggggtggggtggggttggtgtttaacaaggcattgaatgcaaaagggatggtgatatgtggctcatgcccagcctgtgcaaagtcctacgtctcatccctagcacaaataaaacaattataggcatacttagaacattgttatgttgatttgtgattaactttacaacttggtcttgaactcggtcatgaacttgtgagatggttatgcagtttcacggtgtcagaagaatcactcctagctagcagatactggtgatgctttgagagttgtaggctctagaatccagagaaattgtcacgagccaccagagatcctagccacaactggccatacagaagacactcttattggcttataaaaacaataacaaaccaaaaaaaacaaaaaaaccaaccaaccaaaacaaaaccttaaagcacaaggccttcctgggctagctgctcctgcctctaattgagaaaaacatcaggtaaaatgttaaagaaaagggtgtccatgtgggggacacattcctcctcagattccattatatgacatgtctttcttaactgcaggggagacggcacgaaggcagcaagtccctacctcgccaccagcctcggagaacagcagcgcagcccacagcatagggagcactcagagcactccctgctctagcagcagcacggcctaggtggacagatggacgccgctgcctaggtggacagacggatgcctgccaccgccggggcagggccagatgccgatgctgggtgtccagactcagaaggcttgatctgggttccctgtaaagagagagtgaatttcagtatacagacagcctgctctacccaccccttccttaccacggcccacgtaaatgtgaccctggacatctgtcacacgaaagctaagctggtggccttccccgccagcccctcgcaggatgggggtttcaatgtgaaacatatgccagtttttgttctttttttttttttttatgctgctttgtccaggtgtccaaacatccatcatttggggtcgtatgttttaaagagtaaaggagacggtgaagggatgtcagctagagtgtagagccagggagagacagccagggattctcgcctagctgaaccaagatgtaaaataggagaaatgctccctccatagccaatctgcatctcgctctggatgcccactcctgacctgccacgccctacatggtcccctgtgtagcttgctagccttgggggcctgtcacttgccaaagtaacattcctctcttgggccaaaatgaatgctgactcctgatactccgcacaagcacaccaactccaaaagtgccttaaagccaggtttgtgtctcctttcaggagagagcgtgtaacgtcagatttgtgcctgtctcgaacattctgtcctaatcatacttaaacatcaggcaggtggggttcagtggtaagcgaagggattattagcaaggtaatgcctgtgtatggtcatataggcacaaatgcagaacacccagcacattggagagacgaccacttcctcctttaaaatgtcctatgcttccagagtcggaacctgagttatatgtggtagattatattgactccaaccatcagcctttctgatgagcctgtagagaagcctagagagccccgggccatctgatgatgtcaccagtgctgcctcagatgatacagagacagggagtttcaggtgaacttcttcagcagaataaggtgatgccactctgacctttgctgagctcagtgactcttcagtgttaaaactgaaccccagaggggattctccatgccagatccgctgcaaattaaataataccaattttctagagtccctccctcctcccccctcccctgccaaccaacttaagattccataagtagaacaagctagatcctaacctgaaatagccatgagcaaagcccactgcctttacagtcaggcagttgtgcccagaccttcatgaatgaaaacgtcaacgttgaagcgttgctgatggaagcagcgtgtgaagggatacggacaatctctcagtcgatgagccctcgtctgactgaccagagtggcccagcttctattcaattgggaaaatttgaaccaaagcagatttcttcagggctgagggtctccaaccgatgcatagatacattgaaatactttagatttcccacatggatggtttgagactagagaaatacttttctctagttcgttggtttttaacatgaaggtgtctttggggaggacctggatcatgctaccctgtgtttaaaaataatgcgctttgcctaaccttcagccgaatgtaactgataagtatattctatgtataaaaaaatgtttaaagatgtcttcaaggaagactagagtctttaaatcacttatagctatattttactacaaaaattctgtataaagatatatttaaatattttagagaaatttaagttactccttatgaaatgtttaatttcagttactgtgaattcttctaatcagttcgttctttgattttaaaaagaaaaaccttttccatcatattaaagagaaaattagctatgggaagatattaaaagatttcttagatggatgtggttaaaatttttgtaatatatttaaatgtatatttttgagagagatactacattgccaaggactttataaataatcttaaattaacttacaaatttataagatgcaaaccaaaagacttttttttttttaaagagagagagaaaagagaaaaaagcttttatttccttggatctcattatcagaaatattattcagctcaagaaatctgaccccatattggaaaatgaatgtcctttagtattcctgaagctaaagcttgggtgtctcctcccagctcttgttacagtgtttctgactgcttcacccttcacagatttaatacaatgtataagccttactttcataacatattctacaagtttccttaagactgttgttatagtctggctgaacccatttccacctgcaaagtcttgtgttgtgtctgcaggccacagcagtggccacaggggccattttgtcttgttgatgctgaaaccatgctggactgccccagtctaaggcaggactgtctgtgcaaggcactacagctattcacgtggtgttaccgctgcattttcaaaggtcggagatctttcttctgcctgagttggtcatgtagcaattttttcctaaacacaaaatggccttttgcttgtctggtaatgagattgtaaatccatttcctgcgtgtgttctccgcaggcttgcctgagtgtgtggggtgcgcaggcgcgtgcctgtctttttgtactgtaactacctcatggtttgaatgatgagcgtactgctggttgtattaacagagcacatttgtcgggtgagtcgtgtatacaaacttttttttttatcctgtttgttttatctgggggttcgttcattaaactgacagatatttttctaggaaggactattatcagtttccaaatgcaatactctattctggtttttcctgagtgagcctgattttgttcctgtttttcatctacgagggtaaaagcataccccgggaaatccctgtggccagtttgaacacccctgctgtaaccttccctctgttccatggtctttgtgaacctgcttagaggtatagttttgataaccacagttttaattcttttatctgtgcataataaagatatgtatcaattattaatttatgtcatatctggtcatcactaaaccctccccttggtctgacacagctttgatggcacctgctggaacagggcagatgaggatgaagagaaaggaggggaaagaacaaggacccaagagagcagagaggaagggagggggcagggatgccaggctgtgcccagaattcactccatggcctttgagagtcaaagggagaagtcatgtgcatttagactccacccctttcatctccccaaatgtcaatgcaacttccaccgtgcactgtccctgtctgccactagttccttctggttgcccaaggcagaaagtagaatatggttggagtctccttgactccacaccccggtttacaaagcccaggtttcattcattattgacaatatcattttcaaatgatgagtttattccttctacctgagagccttcttggctttaatttttcactacacagcaaaactcctaaacacatgcaaaccatgtcactgcaccacttgagccttttaagcaatttctgtttgcctcactttcttcctagacccacagaagttaccaaagtagagcagctgccatagaagataaatctgcagtcgctttctcgggtcctccagtcacgtccctggaggacctggtatccatgatcttagttcaaactcaaagtcattgatatgttttcataaatagggattttgtggtgttgaatagaaacaacacaacaaagccgacaactagtcatgtggtacagcacagtcccaccccaccccaccccaataatagcaacttcttgtacttggtggctatacactattccctgtagtgaattaagcctcacttcagataatggatttcgaagtattattgtcacagtgctaacaaaacactctgctgtagttaacattttttttgtgtgtgtatgtttatatatgaataaaattgatattatttccccatatgtgcacacacacacatacacacacacacacacttacaacctggtgctttaaaacaaagactgaaagacaattttatcattacaagaggagattttgacctatgacatgtggaaactgatcaagtaaaagggtttggtttggagagcaagctgtgggttcacacccataattccagcactcaggagacagatggaaggactaagttctgagtcagcctgggctgtatgataaatttcaggcaagcctgggctaccaaaaaggttctgtctcaaaaacaaattaaaagaaaaaaatggatgtgagaatctgaatgatgcagttgagcttgatcagctgggttcacgaaagaccgtttccaggctggagaaggctcaacagatgagatagcgctaggaattctgccccatagtgggactctcagcaaatatcatagaattcaatcatgtcgatttaacataatgccaggttaggaatcgatctgatttgattggatacccaatacatttctaaatttcaaggcactacacaatggttaagggttaaagaacttgtgatggcaaatgggaggtatttagagtggaaaacttaggagaatccatggaaacatgctgctgaagaagcactgtgtgtagttacaatgtttcaaattcggaaaacacaacgttgcaagtctcatgcactgtggaactgctgaaggcagaagttcctcacaatgaacacaggcattaggcaggaaacagcgcacactatagaaacgtaacgaaagtggttgccatgaaccactctatcctctcgaagcaaaaaactcagtcacggtgggtgacatgacagggtcagtgtggtcctggtggataaacagacttggtcaggtgggttttaggcaagtgaggacatgaatggttggctgaggttaatcggtgaggaagatgagctgggtatattggaacgtgaggctgtgagatggtttagtgggcagacacccactgccaaggctgataacctgagctcaagccccaggctccagatagtagaaggagagaaccaggtcctgcaagctgccctccaaccttcacacaatgcacattataaatcaaaagtgatagaaatgaattaacagaagctaaaaatacaatattaattactaaaagtaaaatgcacaaacaaataaaaaagttgaaaaaccaagaagacagggagagggctcagtggttaatagcatgggttaatagacctcttgcagaatgtctgtgctcagttccaacacccacatgacaactcacaaccatctataacgccagtttcaactgacattccctgcttctggcctctataaacaccaagagtgcatgtggtacacaaacattcctgtatatcatcaaacactcatatgcaaaaaaataagtaaatctaaaaaagcattcttttcagtagtaaacacacagatgaaaacagatgggaagactaaattctgagatggcaagcctgggctatatgataaatttcaggcaagcctgggctaccaggaaggtagtagtagtaacacagagatgaaaacactgctgagcccatgtagttttacaggtaaaattttctgaaaggtaaaatttccaaatggtttctggtttctggaatggtgggccaaagagaatgcatttttaaaattaaactgagcatggcagtacactgtaacctcggcccttggcaaaacaaggaagaaagatccatccagtcatatggcgctgcagagcaatttcaaggccatgcaaccctgcttgaaaaatgaagaaaagatgtattgccacattactctctctgaaggccatgtgtgagcatgcccagcccctggctcctctatcagccctgggcatgttgacagcattcaagctctgggagtcagatgcatggattagatcttggccctaccacttgttggataagccatcccttaacttaaaattttttttaaaaaaatatacttttcaacatttctgtgaatattaaatgagataatctacatgaagttcttgaggtagaataatagcttaataaaagcatctcctgccatcaccagagttacatgctgtgtgagctttggcaacataatgggtgcagctttatctcattattgagattatttgcactaatggtgagttctaaactattttataatggccttttccagatcattctgtacatttctaatttctctgcctgtttttttttctttttcatatgatgatattttagaatattttttattaactctgagaatttcaggcaatttttgatcatactcacccctcccccaactcctcttggaaatctagtctattaatttctgagaatttcataggtatgatgtgttttaatcagactcagcctctcactgctcccgctgacctagtctcctagttctacactagctccctccctccctcgctatgtttaatagccgactgtcagcctaccaaggatcacatctttaaaggagacccactctttcttgttgagcagccatctgctaaccatctgcaccgcctctgctggggggagggggggtctgtccatttttctaatgagtagtttggtttcttttgtttttgtttttaaccttcattgggaaagatttgtgtcacatgtatgaccagtgttttctttcataccattatctttctcttctattcatgataaacatatcacccggatcattgcttgtcactttaggtagttggcttcatccatctttttcttgtatccattggcttcttgtccctcctgggattctgtgactctagacacaccttaacacctgtcatttttgctcttaaggtttggatgcatgcttaacccatacatgtatgatatgaaggaaggctcacatgcttaacccatacatgtatgatatgaaggaaggctcacatgcttaagccatgcatgtgtgatatgaaggaaggcacacatgcttaagccatatgtgtgtgatatgaaggaaggctctagttttgtttcttccagatcagaattcaattctactgggaggtttaaagttcatccatttcctattgtattaaatttttaaaaaaatgatgaggggctggagatgtagctaagtggtagactcttgtctagcatgcttataaggccatgggtttaatcatactgaagaaaaaggggggtggggtgggatgtggagattgcccagcattaagcgatagatttggtgtgaaatcatagctaggcagtaccgggaaacacttagaacagtaggaggcccacctaagagttaataacaacaggccatcgttttcattaagttcctcactgatcccatgttccaaaggaaaatgtaactcttagcactatgggttctctgatttttctcgagaacaaatctgtctttcccctctctgtcattgtaaaaatcttgagaaaaggttttctggtcagtaataaaaagcagaccaatgtcagatctatcaacatgcaaccctgcgctctctctctctctctctctctctctctctctctctctctctctgtctctccctcactctctctctctctctgtctctccctcactctctctctctctctcctgttccacacattttacaagtcaaagtcatttgtggtgtgttgtttcttccagctgctgcctatgaatgctataataattctataaaatgaagaaatattaacaaacgtcatttctgagaaaaatgctggcatctttttcttgtttcctagcgagccaagctcatacatcgctctttcctaagttaatgtgttcaaaagcatgcaagcaacttgattaatttttacagatgtcattaatagtctgaggtttgagttttggcatttttcttcctttgtctctaactttccatctcagcttttttttttcttccagagaaaatgaacgctgtgcttcatgtagatttgatttccacactaaagtaaaggtcacatgatgtcacccctcctcctcagaaggccacagcctgaactgattttttaatgatttttctcctcttgttgcctctgagaattcattaaaaagaaaaacaaactcaaaagtggaatcccaggattgtaattttgtttctttctgctgtacccaaataacccaaaacgaagcagcttatggggtctgctgggcctgagtctgaggggacagaatccatcagagaggacaaggcatggcagcagcagctctgcgggtgcaggagtgagcatccgggtggggctctcaccccctagcatcttggcagagcaggaagcagagagcacacaggaagtgtggctgggcaaggcccagcttccagggacgcacgtcctctggagaggccccattgtctaaggttgcacagcacttcatgcagcactgcccaatggggaccaagtgttcagacacacaagcatctgtgccacaccacctaccgtcttagctcgagaagaagtgaaggctgggaatgagtgtaggaggatcaacctccaggtaccctcggtcacaaaccagagatgcagacagatctagagtcctgcagagtgcaacttgttgggggacctaatcatggaagtgtggtcctgtgtatccagatgagcatatttatgggttaggaaaaaactgaattcaccctgcctgggatatacctggactaggatgatactaaagttacatacatccaatagtaaagacccacatatatttctaaccatttgatctgtttttcatttgctaggatagtatgcaggaaaaacaacaacaacaaccagggttacttagggatatcatgatagttatggttttagatgtatgtaaatacatcaagcactatccatacaatctccactccttaatcgacccttacaatgtcatagcctccttgaaccctccttgaacatatcctcagcctgccaagggattgagcatcgtgtagacaggaagactgttttcccagcatgcacacataatccacagcaacagtcaaggcaagagctcaaaacaaaagtcatgcaaacaataactactaacttttacccagagccccaagaacaaagctcagccacctcctgtatgaggcacatgaggcacaagcgtgggtttcccaacagtgcagtctccagggacaatagaaaaaacaagagtaatgctgtgattagaaaaccaaacacaggtcggggcaaatgtgctcacccaaacggcatcgtctctgctggaggacacagcggcagtgccaggggctggcgcagtggagcaagcatccatgctggctggtatgatggagtctgttgtagttggactataaaaatgcccccctacagatttgtatgtttgagtatgtgacctcagctggtggcattttttggagaagttgtggaacctttgagatgtgacctaattatcaggagtggattaactgagggcaggacttgaagggttcatctggctctggccctatctctgcttcctggttattcagactgtaactgtcagttcctatatgatggtcccaccactctggacacccagttgtcatgtcttcctagctgtgatggtttgtattccctgagccatgagccagaacaagtccttcctcccttaaatgctttctttcaggtagtctgtcatcagaagtgtcaccaatacacagacatatcaggtgcagggccatgccttgttgtacttgtaacatcctgaaacagtatcatcattaccagttagcatgatgtcacctacacgatgcagccagatggtagcagtaggaaacatggaacaccttggctgctaagtgaagcaagcctgattttgttagtctagtttcaaaagatttctgatgctggcattcagagaagcatgcccagagccaaggaaacatgtgacttttttttttcagcacagggtcaatagtacactctgcatagtcaggaggcatggccttattttagcttcctatagtccatccatccacgcactcgttcatcagggtggaatacatgtgtacaggtccagcctgtgcaaagctgaacagtcctcttaggggggagtgaggaaggctataggaaagatagaaaagagatgcaagagacagatgtgggagggctgcaggtcattaccacatcagcactgagtgtgtttctcatatgccttttatactgcagtactatggaaagcaaaaccacaagctaacagaaacaatttgctaaaatatacgcagaagacatttgtttccatccaaaagcctccctattccttccatcaaggtcaatagaatcttcagcctcttgccttgagcctcaagtgcacctctcctatccttcgatgtcccagcaggctgggaaatctgccaacaaaccctgacctgctttgactgcccagcaggcagagagagagattcatattctctctttctctcccccccccccccccccccgcttcagagaagcggcaaacagctcccgacacgcatggatacagcttgatataactacagccatattgagtggtagttattacccctgaacaaccctgcttttctagaaaactaggtaaaaccagtagactcatattaagagcctgaatctaaggatgtacctaattctttgttattatcttaagataaaccagataaatttcagccaggatgaagtcacttatgtaccaaatcacaaatattccccattcctgatccaaattgaagagatagcctcacacatatgcacagaaggccacagcagttgcatggctatcttgtttgtttcctttctcttcagcatcacgattttgtctaaaatctgaaaacgattaattcacctttactcctaccccaccccacccccaatttaagaattattcataacagggagacctgtttattccacaatggaaagaaatggaagttgtctctttgatcatataaaatgcatttactcctaaactaaatggctatgaatactatatattttcccttaagatgattcgtgacattcagagaatctttaaaatacaactaaaccattatactaattaggttgattcctggcttaactcattaggccacggtgtatgcagagtaaggagtaaccacccacgggacagatccagtgactctggcgctgagcatctaatgaatacagcttgctttctttcctgtttggggagatgcttgaagccacactctattttaaactggtttggtaaacttgcaaccaaaagaaaggattcctgtggtgactcaaagcaaaggctccttttgtgaaatgaataaacacttcctaatctttctgtaaataaagattttcaaacatttggttggcttgccgtattcggtgagaaatctgtttgccaaggctaagtgtgggtgtggatgtggatgtggacggtgtttgggaaatgaataagaaagaatggctttacccagaccttatcctaaaccctgctggtctgggtagaagccaggtggttttgaatgagatgataagtaacaagcatgagataagaaatcagtacgtgtgcacacagaaacatacatgtgcacacacatagacacgcacacagacacaggctcacacatgtgcacacacatacacacaggcacacacatacacacacagagatatacatgtgtacatacccaggcacacacacagacacaggcacacacagagacacacatgtacacatagataaagacacacatgtgcacagagagacacatgtgcatacacagagacacacatgtgcacacatagaaacacacatgtgcacacatgcaaagacacacatgcatacatgcagagacagacacaaacacacacacatagacacacatgtattcacacataaatacacaggcacacacagagacacacacgtgctcaaacacagacactcacacacacacagacacagatgcactgacacagatgcagacacatataggcacacacacacacacacacatgcacgtgcgcgtgcacatttaccaatttatatgctagtttcaggtcacctgtctgctatgaaaaaatttgtatactcatttatttatgatgcagcaactacttattccgtgtacactgtgtgtcaggtgctgctgtggttagcttacaggcgggtccactaggctccacccaaagataaataggtttcagatggaactctttactattcctttatctacagaactcactttacagtggccgttcccaaagatcagccacctgcatctcattcatggtaaataattaggaataaggcgtaaagtttaagatctgggggtgtgaaagcttaagttgaggatctaagacaatgtcttaaagtctaagaaggtgttttaaggctggtaagtttaagattttaaatttcctctggttgtcttttaagtatagacctaagggtgtttttcatgatcagtttatatacagccagtcttctggatgggggaagacactccttcagcctgtgctcacactggaaaccagatccagggagcttttgtccctcctgctccgtggacggcttctgtctgctgagctcaccctaaagagcatttgtgctcttaacataaaacaaaaaacaaaaatgtttaccaaccctctactatgacacaaatacgtatatcttgtgcctttttctacagtgtggatttcagtacagaccacagtggtaatgcaaacctgctgaacatttctctcttttttggattcacctcctatgggtcgaatggactccagataatgcccctgccaatcaacagcctaactttaactcctattgctactagagagggtggggttcctctgccactccctggttgggggactctcctcccagcaactaccaaaaccatggaaataaaatctccaaatataaacctaaaaaaaataatttccctaaccttcttaactttatcttctttgtgtgtgtgtgtgtgtgtgtgtgggtgtgtattccagtatcctgccaagaccaggtgtctccttgagatctccatccaggaaggctccagagtggctacccacaggtgtctggtctagcctc

SEQ ID NO: 460 - DNA, 6093 bp, Mus musculus
ggcaggaggaggagtttctaggcggccgagcccccgaggcccgcggtgcccttcccccctttcgctgattgctgtggctgcgcgcccgaccccgcccgcgcgtgtgcgcggccgagttagggcgccgcacgggcctgatgggggtgatccaggctttcggggacgccgagcgccactttcctcctccctggcagtgagagagagagagaggtggagagggagaagcgggctgctgtccttccaggccactttcgctgcgcgattccgcgagctcccggcaggaggtgaaagtccccggcggggtccggatggcgcagttgaactgcggctgctgagctcgcggccgcctgcgcgcgctgggcgcggggactcgtctgggctactcccccacctcgcgttggacgaccggtcctggacacaccgcttgcgaggcaagttgaacattgcagagaaggatcttaaggctacacccgacttgccacacttgccatccagctgaagaaccaaaggctgttggagagatggcagtgacatcccaccacatggtccctgtgtttgtcctgatgagcgcctgcctggccaccgcaggtccagagcccagcacccggtgtgaactgtcaccgatcagtgcctctcatccagtccaggccctgatggagagcttcaccgttctgtctggctgtgccagcagaggcaccactgggctgccaagggaggttcacatcctaaacctccgcagtacagaccaaggactaggccagccgcagagagaggttaccctgcatctgaaccccattgcctccgtgcacactcaccacaagcctgttgtgttcctgctcaactccccacagcccctggtgtggcatgtgaagacagagagactggctgctggtgtccccagactcttcctggtttcggagggttctgtggtccagttttcatcaggaaacttctccttgacagcagaaacagaggaaaggagtttccctcaagaaaatgagcatctgctacactgggcccaaaaggaatatggagcagtgacttcattcaccgaacttaagatagcaagaaatatctatattaaagtgggagaagatcaagtgttccctcccacgtgtaacatagggaaaaattttctctcgctcaattaccttgcggagtaccttcaacccaaagccgccgaaggttgtgtcctggccagtcagccccacgagaaggaagtgcatatcattgagttaatctcccccaactccaatccttacagcaccttccaggtggatataataattgacatacgacctgctcgagaggatcctgaggtggtcaaaaacctcgtcctgatcttgaagtgcaaaaaatctgtcaactgggtgatcaagtcttttgacgtcaagggaaacttgaaagttattgctcctgacagtattggctttggaaaagagagtgaacgatccatgacagtgaccaaattggtaagaaatgacatcccttccacccaagagaatctgatgaagtgggcattggacaatggctacagcccagtgacgtcatacaccatagctcctgtggccaatagatttcatcttcggcttgagaacaacgaggagatgagagatgaggaagtccacaccattcctcctgagcttcggatcctgctgggccctgaccacctgcctgccctggacagcccatccttccaaggggaaatcccaaatggaggtttccccttcccattcccggatatccccaggagaggctggaaggagggagaagataggatcccccggccaaaggaacccatcattcccagagttcaattgcttccagaccacagagagccagaagaagtgcaagggggcgtgaatatcgccctgtcagtcaaatgtgacaatgaaaagatggtggtagctgtagacaaagattctttccagaccaatggctactcggggatggagctcaccctgttggatccttcctgcaaagccaagatgaatggtacccactttgtactggagtctccgctgaatggctgtggtactagacataggaggtcagccccagatggtgtggtttactataactctattgtggtgcaggctccatcccctggggatagcagtggctggccagacggctacgaagatttggagtcgggtgataatggatttcctggagacacagatgaaggagaaactgcccccctgagccgtgctggagtggtagtgtttaactgcagcttgcggcagctgaggagtcccagtggcttccaggaccagctcgatggaaatgctaccttcaacatggagctgtataacacagacctctttctggtgccctccccaggggtcttctctgtggcagagaatgagcatgtatatgttgaggtgtctgtcactaaggctgaccaagatctgggatttgccatccaaacctgctttatctctccatactcaaacccagacagaatgtctgattacaccatcatcgagaacatctgtccgaaggatgactctgtgaagttctacagctccaagagagtgcacttccccatcccacatgctgaagtggacaagaagcggttcagctttgtgttcaagtccgtgttcaacacctccctgctcttcctgcactgcgagctgacgctgtgctctaggaagaagggctcccagaagctgccaaagtgtgtgactcctgacgacgcctgcacctctctagatgccaccatgatctggaccatgatgcagaataagaagacattcaccaagcccctggccgtggtcctccaagtagattataaagagattttccacggcctggacacgctcaccgtgatgggcattgcgtttgcagcatttgtgatcggagcactcctgacgggggccttgtggtatatctactcccacacaggggagacggcacgaaggcagcaagtccctacctcgccaccagcctcggagaacagcagcgcagcccacagcatagggagcactcagagcactccctgctctagcagcagcacggcctaggtggacagatggacgccgctgcctaggtggacagacggatgcctgccaccgccggggcagggccagatgccgatgctgggtgtccagactcagaaggcttgatctgggttccctgtaaagagagagtgaatttcagtatacagacagcctgctctacccaccccttccttaccacggcccacgtaaatgtgaccctggacatctgtcacacgaaagctaagctggtggccttccccgccagcccctcgcaggatgggggtttcaatgtgaaacatatgccagtttttgttctttttttttttttttatgctgctttgtccaggtgtccaaacatccatcatttggggtcgtatgttttaaagagtaaaggagacggtgaagggatgtcagctagagtgtagagccagggagagacagccagggattctcgcctagctgaaccaagatgtaaaataggagaaatgctccctccatagccaatctgcatctcgctctggatgcccactcctgacctgccacgccctacatggtcccctgtgtagcttgctagccttgggggcctgtcacttgccaaagtaacattcctctcttgggccaaaatgaatgctgactcctgatactccgcacaagcacaccaactccaaaagtgccttaaagccaggtttgtgtctcctttcaggagagagcgtgtaacgtcagatttgtgcctgtctcgaacattctgtcctaatcatacttaaacatcaggcaggtggggttcagtggtaagcgaagggattattagcaaggtaatgcctgtgtatggtcatataggcacaaatgcagaacacccagcacattggagagacgaccacttcctcctttaaaatgtcctatgcttccagagtcggaacctgagttatatgtggtagattatattgactccaaccatcagcctttctgatgagcctgtagagaagcctagagagccccgggccatctgatgatgtcaccagtgctgcctcagatgatacagagacagggagtttcaggtgaacttcttcagcagaataaggtgatgccactctgacctttgctgagctcagtgactcttcagtgttaaaactgaaccccagaggggattctccatgccagatccgctgcaaattaaataataccaattttctagagtccctccctcctcccccctcccctgccaaccaacttaagattccataagtagaacaagctagatcctaacctgaaatagccatgagcaaagcccactgcctttacagtcaggcagttgtgcccagaccttcatgaatgaaaacgtcaacgttgaagcgttgctgatggaagcagcgtgtgaagggatacggacaatctctcagtcgatgagccctcgtctgactgaccagagtggcccagcttctattcaattgggaaaatttgaaccaaagcagatttcttcagggctgagggtctccaaccgatgcatagatacattgaaatactttagatttcccacatggatggtttgagactagagaaatacttttctctagttcgttggtttttaacatgaaggtgtctttggggaggacctggatcatgctaccctgtgtttaaaaataatgcgctttgcctaaccttcagccgaatgtaactgataagtatattctatgtataaaaaaatgtttaaagatgtcttcaaggaagactagagtctttaaatcacttatagctatattttactacaaaaattctgtataaagatatatttaaatattttagagaaatttaagttactccttatgaaatgtttaatttcagttactgtgaattcttctaatcagttcgttctttgattttaaaaagaaaaaccttttccatcatattaaagagaaaattagctatgggaagatattaaaagatttcttagatggatgtggttaaaatttttgtaatatatttaaatgtatatttttgagagagatactacattgccaaggactttataaataatcttaaattaacttacaaatttataagatgcaaaccaaaagacttttttttttttaaagagagagagaaaagagaaaaaagcttttatttccttggatctcattatcagaaatattattcagctcaagaaatctgaccccatattggaaaatgaatgtcctttagtattcctgaagctaaagcttgggtgtctcctcccagctcttgttacagtgtttctgactgcttcacccttcacagatttaatacaatgtataagccttactttcataacatattctacaagtttccttaagactgttgttatagtctggctgaacccatttccacctgcaaagtcttgtgttgtgtctgcaggccacagcagtggccacaggggccattttgtcttgttgatgctgaaaccatgctggactgccccagtctaaggcaggactgtctgtgcaaggcactacagctattcacgtggtgttaccgctgcattttcaaaggtcggagatctttcttctgcctgagttggtcatgtagcaattttttcctaaacacaaaatggccttttgcttgtctggtaatgagattgtaaatccatttcctgcgtgtgttctccgcaggcttgcctgagtgtgtggggtgcgcaggcgcgtgcctgtctttttgtactgtaactacctcatggtttgaatgatgagcgtactgctggttgtattaacagagcacatttgtcgggtgagtcgtgtatacaaacttttttttttatcctgtttgttttatctgggggttcgttcattaaactgacagatatttttctaggaaggactattatcagtttccaaatgcaatactctattctggtttttcctgagtgagcctgattttgttcctgtttttcatctacgagggtaaaagcataccccgggaaatccctgtggccagtttgaacacccctgctgtaaccttccctctgttccatggtctttgtgaacctgcttagaggtatagttttgataaccacagttttaattcttttatctgtgcataataaagatatgtatcaattatt

SEQ ID NO: 461 - protein, 857 aa, Mus musculus
TLQRRILRLHPTCHTCHPAEEPKAVGEMAVTSHHMVPVFVLMSACLATAGPEPSTRCELSPISASHPVQALMESFTVLSGCASRGTTGLPREVHILNLRSTDQGLGQPQREVTLHLNPIASVHTHHKPVVFLLNSPQPLVWHVKTERLAAGVPRLFLVSEGSVVQFSSGNFSLTAETEERSFPQENEHLLHWAQKEYGAVTSFTELKIARNIYIKVGEDQVFPPTCNIGKNFLSLNYLAEYLQPKAAEGCVLASQFKEVHIIELISPNSNPYSTFQVDIIIDIRPAREDPEVVKNLVLILKCKKSVNWVIKSFDVKGNLKVIAPDSIGFGKESSMTVTKLVRNDIPSTQENLMKWALDNGYSPVTSYTIAPVANRFHLRLENNEEMRDEEVHTIPPELRILLGPDHLPALDSPSFQGEIPNGGFPFPFPDIPRRGWKEGEDRIPRPKEPIIPRVQLLPDHREPEEVQGGVNIALSVKCDNEKMVVAVDKDSFQTNGYSGMELTLLDPSCKAKMNGTHFVLESPLNGCGTRHRRSAPDGVVYYNSIVVQAPSPGDSSGWPDGYEDLESGDNGFPGDTDEGETAPLSRAGVVVFNCSLRQLRSPSGFQDQLDGNATFNMELYNTDLFLVPSPGVFSVAENEHVYVEVSVTKADQDLGFAIQTCFISPYSNPDRMSDYTIIENICPKDDSVKFYSSKRVHFPIPHAEVDKKRFSFVFKSVFNTSLLFLHCELTLCSRKKGSQKLPKCVTPDDACTSLDATMIWTMMQNKKTFTKPLAVVLQVDYKEIFHGLDTLTVMGIAFAAFVIGALLTGALWYIYSHTGETARRQQVPTSPPASENSSAAHSIGSTQSTPCSSSSTA

SEQ ID NO: 462 - DNA, 243390 bp, Homo sapiens
  misc_feature (1)...(243390): n = A,T,C or G
atatatatatatatagagagagagagagagagagagagagagtaaaaaatccgtggttgaaaaccagggggtggcctgtggtgttatgatatatattatttttacccagggttcctggctcataactcccataggccctgttagaaccttctgttagaacgttggctgtgttaggcctcaggggcaggccttctgtcccttttcctgtctcccttccactctaatgtcctcttgactttctgattgtgggtcttaaggccttcccatgagagggtcccaccctataccctggggaaagaaatgctgatgtcgtgaagcttccagaaaaatccaaaaggactggattcagtgaacttccagacagctggaaggttgcaccaggagggcaaggtggctccacaccccttcccctatgcctcaccctacatgtcttacgtgcctctttatctgtatcctttgtaatatccttcataataaacaggtacatgtaaaaaaaaaaaagaaagaaaagaaaaaagaaaagaaaaatcgaatgatacagccacaaagaacacctagagccaccagaaagctgcaagaggcaagatttctccctgagagccccacaggtagagcagccctgctgacaccgtgctttcagacttctggtttccagaactgggagaaaacacattgcgattgtttacagcagccataggaaactaatacagggagggaggagtcccggatgcccccgaccctcatcccaggtttctgagtgtctgatattgtcatttactgagttagagaagtctgggtttctgggggttgggagatggagttctgatttggacacattacatttgaaatgcttgtaagatgtccaggcagagatgttgatcaatagctggatagagtagtctggaactcagaggaggatcaagtgggaaggtagaaattgggaactgtcaagcatacagatcacattctttttaaattttaattaattgatttttttttttagagacaaggtcttgctttgttgcccaggctggagtgcagtggtgagatcatagctcactgttgcctggaactcctgacctcccagctgggactacaggtgtgtgtcgcaaaccagctactttttcttttcttttttattttttagtttttttgagatggtgtttggctctgtcacccaggctggagtgcagtggcgcaatctcagctcactgcaacatccgcctcccgggtttaagcaattctctgcctcagcctcctgagtagctgggattataggcatccgccaccatgcccggctaattttttgtatttttcatagagatggggtttcaccatccaggctggtcttgaactcctgacctcgtgattcacccgcctcggcctcccaaagtgctggcattacaggcgtgagccactgtgcctggcctcattggctaacaaaaacatttttttttgtagagatggggtctcactatcttgcccaggctggtctcaaactcctgggctcaagcaaacctcttgcctcagcctctcaaagtgatgagattatagtgtgaaccattgtgcacgggcaattaaaaaaaatttttttagagactgggatcttgctatattgcccaggctggtcttgaactcctgaggtcaagtgatcctcctgcctcagcctcctaaaatgctgggagtatagctgtgagccaccatgcctagtccaaaatatttttttccgtttgttgactgatggctggccttccataattagagattcattcctttagatattcaaacataaacactctttgggagaaatcattcatatgctttttctttatatgtttgttagaatttgtttatcagacactttcccttagagcaggttatgatgtagtgggtgatagagtgtgaaagagcgaaagttaggcaggctgagtagaaaaaggcaatcaagagaaactggaacccttaaagcctgaccatctctgctttacagttttgcatgggagggaaatggcagcctagagaaagattcctcaccactatgccattgcctgaaaacttttttttttgagacaaggtctggccctgtcacccaggctggagtgcatggcgtgatctcagctgactacaacctctgcctcccaggttcaaatgattctcatgcctcagcctcctgagtagctgagattacaggcacatgccaccacgcccggcaaatttttgtatttttagtggagacaggttttcgccatgttgcgcaggctggtctcaaattcctggccttgagcgatccacccatctcagcctcccaaagtgctgggattacaggcgtgagccaccgcgcccaaactgaaaactcatttatcaaacttttttcccatagatggaatctgagctgacacacccttctccagaatgaaaagaaatgtgaaagaaacacgctgacacacaggggacacctttacaatattatgagaggaaatctgctgcatggacttcacagcattttgttaagggctgttctgtagtttctgcattctccaatgggatggttacttttactagcctgtctatgttacctcctcttgtctccatggctaatatcatcagcctagcactagcctattgtgactctccggaactactacagcagccccctacatctggccagatcccctgcaaccctccacctacccccgaccttcctgctagctctgagagagagggagcatttttaagacgcaaatatgcttcccattcttcagtgctccttggacaaaaaaaccataaagctttgtttgatctaactattgtcctatatttccagctttatctctcccctccctctcccgtcccaatgcccatggggacttggctctctgagatccagctgcactgacattcattcagtgtttccagctccacaaacccttgctcagtctggaatgggttccccatcccttcattaggaaagcagtcctgacctctttccctccccaactgtatcaagtccccctattttgagatttctggcaccgtgtaccttttctgcctgattcttatgagagttgtaattatatgtatatatatttttagtgggattattttatcaatgtctcttccctatcagattttaatctccatgagagcaggtatctttttcttggtggcatccctcacatccagccgccctgggccagttacaggatctcattgtatgttggctgaatagatgaaataaatgaacatattttgccactaattgttaagttaccagatgaattgtaagagttctcaggatggctgacttctatgtggctctttagggcttgaaagtgattcataataatattgagtctgattttcctcctcctggggagattccaactctgagtaaaaggagataagttcttgcaggccccaggagaaatggtatcttttttgtgatagcaaccagcaggaagggtttctcttatgaatgaagggaaaactcaatgaaggacgatgtccaccttaacatagagagccactccctcacccccacgtacacacttttacaatgtgctctggttatttgaaaatgtgtttggcctccctgaaagaagaaagaagaggataactaaactcaatcactttaaatagaaaggaagacacaggggcgatgcttgataaaattaccaaaaaacattaatttaagaaaaaagtctacatacctcacatgtagttcaaattttttttttcaaatattaagtctccaaaacatggctctagtcttcagagtgaggaaaatatggtgtacatctgcacatttgctttctcatggcttgtgtttaattatccacaaagaaaaaaattcacaagatgtttcatgttcttctcttttaactgccaaagcaggaacttctgaggctttgatagaattggttgcaatccctttgaaagtttttattaatgtagacagagtatgtttttaatcttttgtattttgaacacccaaatttatgttctgtgatttgttcatgcttgattctatcatattttaagtaaacaaggagtcaacagtttttacccagcaaaatatattgggattttttaaaaatatagtgtaatgatgattaatgaacaaagtattaaatcagaggattcttcattgtgacagaaaggaagtcttgagacccagtgagagattgatatctccattgattttaatgtaaacatcagagacattccactgtgaacacatttctttccggagattttctttctggaaagaaatgtgttctggaaagagggagaaaagcataattacaaagaaaagcataattttctaggacaatgcatacaaatttagccataaggtaatcatttatatgataaacattaaatgagatttcataccttttttttgttgttgttgagacggagtctcaccgtgtcacccaggctggagtgcaatggtgccatctcagatcactgcaacctctacttcctgggttcatgaggttctcctgcctcagcctcccaagtatctgggattataggcgcccagctaaagagatttcacactctcttaaatccagaaaaataatgcatgtggtacaatatttccttctaggtattcttaaattcaatctgtgatgacaatttagagattaattttttttttctttgagacacagtcttgctttgtcaccaggctggagtgcagtggtacgatctcagctcactgcaacctccgcctcccgggttcaagccattctcctgcctcagcctcccgagtagctgggactacaggtgcgcaccaccatgcccagctaatttttgtatttttagtagagatggtttcaccatgttggccaggatggtctcgatctcttgacctcgtgatctacccacttcgggctcccaaagtgttgggattacaggtgtgagccaccacgcccagcctattttaatgttttaatggtgtgtgatctacttttcaaataagaaaagatgtagttaaatgttaattaagcattttacttctgtcttccagaatagaagctccctgaggctgagaatttttttttttttttgagacagtgtctcagttacccaggctggagtgcagtggcacgatcatggctcactgcagcctctgccgcctgtgctcaagtgatccttccacctcagcctctcgagtagctgtagttccagttactcaggagactgaggcaggaggattgcttgaagccaggagttcgaggccacagtgccctatgatcacacctgtgaatagccactgtactccagcctgggcaacacagctaggtgtgatggtttattcctgtaatccccacacattgagaggccaaggaaggaggaccacttgaagccaggagttcaagaagagcctgggaaatatagggagaccccacctctacaaaaaaatcaaaaattagccagtcgtagtggcacacacctgtagtcccagctactcagaaaagctaaagtgggagaattgcttgagccagagaagttgaggctgcagtgatccatgattgtgccactgcactccagcctgggtgacagagtgagaccctgtctcaaaaataaataaataacggccgggcgcggtggcgcatgcctgtaatcccagcactttgggaggctaaggcaggcggatcacaaggnnnnnnnnnnnnnnnnnnnnnnnnnnnnnnnnnnnnnnnnnnnnnnnnnnnnnnnnnnnnnnnnnnnnnnnnnnnnnnnnnnnnnnnnnnnnnnnnnnnnnnnnnnnnnnnnnnnnnnnnnnnnnnnnnnnnnnnnnnnnnnnnnnnnnnnnnnnnnnnnnnnnnnnnnnnnnnnnnnnnnnnnnnnnnnnnnnnnnnnnnnnnnnnnnnnnnnnnnnnnnnnnnnnnnnnnnnnnnnnnnnnnnnnnnnnnnnnnnnnnnnnnnnnnnnnnnnnnnnnnnnnnnnnnnnnnnnnnnnnnnnnnnnnnnnnnnnnnnnnnnnnnnnnnnnnnnnnnnnnnnnnnnnnnnnnnnnnnnnnnnnnnnnnnnnnnnnnnnnnnnnnnnnnnnnnnnnnnnnnnnnnnnnnnnnnnnnnnnnnnnnnnnnnnnnnnnnnnnnnnnnnnnnnnnnnnnnnnnnnnnnnnnnnnnnnnnnnnnnnnnnnnnnnnnnnnnnnnnnnnnnnnnnnnnnnnnnnnnnnnnnnnnnnnnnnnnnnnnnnnnnnnnnnnnnnnnnnnnnnnnnnnnnnnnnnnnnnnnnnnnnnnnnnnnnnnnnnnnnnnnnnnnnnnnnnnnnnnnnnnnnnnnnnnnnnnnnnnnnnnnnnnnnnnnnnnnnnnnnnnnnnnnnnnnnnnnnnnnnnnnnnnnnnnnnnnnnnnnnnnnnnnnnnnnnnnnnnnnnnnnnnnnnnnnnnnnnnnnnnnnnnnnnnnnnnnnnnnnnnnnnnnnnnnnnnnnnnnnnnnnnnnnnnnnnnnnnnnnnnnnnnnnnnnnnnnnnnnnnnnnnnnnnnnnnnnnnnnnnnnnnnnnnnnnnnnnnnnnnnnnnnnnnnnnnnnnnnnnnnnnnnnnnnnnnnnnnnnnnnnnnnnnnnnnnnnnnnnnnnnnccaaaaattcaaaattagccaggcgtggtgacgcatccctgtaatctctgctacttgggaggctgacgcaggagaatcgcttgaacccgggaggcggaggttacggtgagccaagatcgtgccattgcactctagcctgggtaacaagagtgaaactccatctcaaaattaaagaaaaagaaaaagaaaaaagagagttgtgtattatggggcttatataaatgtttcctttttttcctccctgatcatatactcatcctcactcctagatgtggaacataaccaagctgaaagatgagatcatgtttgtgaagcccagtgaaatctcaacaagaatcttctaatttgagaggcatcagtattctactcactcatatgccaaaatgctgaagaataaaatcaggagtttaaaaagtcattttcagcattgggattaaacaaagaacaccgaatttttcatttttgtatttttaaaatatttataataacttattttttcttgtaagcatgatgctgtttcacttagaaaaattgactcagccaacaatagtgatttgcaaatgcaaataatgccaatgtcttcctttttttctcagtattgttgaaattatttctatgttaactcttttgtttttattttgaagttggcaaatttttatatttatttatttattttttgagatagggtctcgctctgtcacccaggctggagtgcaggggctcaatctcagctcactgcaacctctgccttctgggttcaagtgattctcctgcctcaccctcccaagtagctgggattataggcatccgccaccatgcccagctagttttggtatttttagtagagacgaagtttcaccatattggccacgttggtctcgaactcctgacctcaagtgatatgcctgcttctgcctcccaaagtactgggattataggcatgagccaccacgctgggccaaaattggcaaaattttatgaagaactcttagaccactatttattaatttcctgatttgcttttttaatatgaagaaacatttttcctttgttactttttcatgtacttgtatatgattattatttattagtggtctgatttgctttttcaatatggaaagataattttccctttttttcatgtaattatgcacacactttattgcttaggatgcagaacatatgaggataactttttttttttggcagatgtttaccatatgtggagcttagttagcatagagaatactcatgagtcaagaatggcccaccccaatgcccctttgaaacatttgtatgtggtttcatgaaataaatacttttttttttggagaggtagtttcactcttattgcccaggctggagtgcaattgtgcgatcttggctcactgcaacctccacctcccaggttcaagcgattctcctgcctcagactcctgagtagctgggattacaggcaggtgccgccacacccaactaattttgtatttttagtagagatgggggtttctccatgttggttaggctggtctcaaactcctgacctcaggtgatccacccgtctcggcctcccaaagtgctgggattacaggtgagccaccgcacctggcacaaatgtatattttaatagagtcaagatggccatgctgaagtctttgtttttgggtaatccaacccaaactatctgctgtgggcatctatttttttttttttttttgagacggagtctcactctgtcacccaggctggagtgcaatggcgtgatctaggctcactgcaacctccacctcctgggttcaagcgattctccagcctcagcctcctgagtagctgggactacaggcatgtgccatcatacccggctaattttgtatttttagtagagacggggtttcaccatgttggtcagactggtctcaaactcccgtcctcaggtgatctgcccacctcagcttcctaaagtgctgggattacaggtgtgaaccactgtgcccagccgggcatctattgttttttctgcacactctaccatacctcttaaaaaattttttaaaaatttttattgtttgtgggtacatagtaggtatatatatttatggcatacatgagatattttgatacaggcatgtagtgtgtaattatcacatcatggtaaatgtggtatccatcgcctcaagcatttatcctttgtgttacaaacaatccaattatactctgttttttaaaaaaatgtacaatgaaattattattgactttagtcatactgttgtgctattagatactagatattattcgttctaactggaataatatattttttaaacagtaaagaatgagatataaaagtgaaagagaaagagaaaggtactgtattcctgggtaaatatacatgctccctttgctttccctgtttcattgacagccatgcacacttacgtttatattcctcattatttgataatcttccccattagagaaataggaaaggctctagaacacatgaacacacttatacagcctttatgatatccaaatttatccattttacgccaaaaaaaaaaagtactttcagtagtgcctcccatgtatctttcaaaaggtacatagctctgggtgcacaaaaaaattaacacaattccctatacaaaagggactgctcagagctaataacagctaaagaagagaggacgccaattgcaggtacaggcacatctcttcgaaccctcccctaaaacaaatgaaggacagaagaaaacagaaaactggttaattcaattattactctgcggaaacttagggatagtgcaaataaagctctgaaattagactttactgagccctgcctcttgggcatcccccaagaagtgtccgcgaccccccagaaacctcagggacaccctcctagacaccccgccccaccagcctcacagggatgaacctccctaccattctttgaacccccctaccattcctttttgtctggaatcagatcttgatttccttttggggaatcgcccctcccctggccatgtggttctcgcgagatgagcacagtgccccacctactctgaactaagaatcttgtttttttgagacggagtctcaccctgtcgcccgggctggagtgcagtggcgcgatcgcaacctccgcttcccgggttcaagggattctcctgcctcagcctcctgagtagctgggactacaggcgcacgccactacacccggccaatttttgtatttatttattttattttattttattttttagtagagacggggtttcaccatgttggccagaacagtctcgatctcctaacctcgtgatccacccgcctcgggctcccaaagtgttgagattacaggcgtgagccaccgcgcccgtccagaattatctttaaaatttatttctttaagatttgtagctactaagaaagaaaggagctttttttccttgggccttcaaactgaaagaaccgcatgagcctgaagctgcgcatggtcttaacatcaggctgtgcaggaagaagctatctgcagatggatgccagcacacacaaggaagcagagctctggcaacattgaggtcagtaccttcttttttgcttaagctaatattaattgaatttccatcatttgcaaccaaaagtgctttgatactgcttttcatctaggggtaagaatgatcaacttggtgcaagcaaaagtaactggttggccaggcgcggtggctcgcgcctgtaatcccagcactttgggaggccgaggcgggtggatcagcgaaaccccgtctctactaaaaatacaaaaaattagctttgcgtgctggtgggcgcctgtaatcccagccacttgggaggctgaggcacgagaatcgcttgaacctgggaggccgacgttgcagtgagccgaggtcgtgccactgcacttcagcctgggcaacagagtgagactcttacctcaaaaaaacaaaaacaaaaacaaaaagtaactggtcaacggttgtgagtaatagaaaacttatcacaatctcttttggataactggtaaatttttattggtttggcatgctaaatttagaaagctcaaataactagcatttttctgtaccctagagaaaagtgttaaataagccaactgatcctgaggattattcaaagatgtaattccaggttatgtcagagtgtcagtgtggattcaacttaatcacctacatttccaacattaataggattattctgtagaaactgatgccaagagaaatgatcctgagttctgtactaataatagctacaacatattgacatattttgtgccaagaagtgtgctaagcctatcattatttatatttaattcgcccagaaatcctaaaaggtaggtgtgattgttccttttttacaggtaaagaatctggccaggcatggtggctcatgcctgtaatcccagcattttgggagaccaaagcgggcggatcacaaggttaggagttcaagaccagcctggccaccatggtgaaactctatctctattaaaaatacaaaaattaggccgggcgcggtggctcatgcctatagtcccagcactttgggaggccgaggtgggcggatcacctgaggtcaggagttcgagaccagcctggccaacatgacaaaaccctgtctctactaaaaagtacaaatattagccaggcatggcagtgggggcctgtaatcccagctactcaggaggctgaggcaggagaattgcttgaactcaggaggcagaggatgcagtgagccgagattgcaccactgcactctagcctgggtgacaagagtgagactccacctcaaaaaaaaaaaaaaaaaatcagctgcatgtggtggcacgcgtctgtaatcccagctacctgggaggctgaggcaggagaattgcttgaacccgggaggcagaggttgcagtgagctgaaatcccaccattgcattccagtctgggcgacagagcaagaaaaaaaaaaaaagaattttaggtttagtaatgtgctcaagcatgggctttgaaattagaaagacaactgacaagtagtagaacccaaatctaagccctcatgttgatatttctaaaaaaaaaaaaaaaaaaaaaatccaagccctggatctttctaatttcaaacccatgcttttaaccactgtgctctctataagtttccaaagtaagtttttgagttagcagggttttactatagttttttgagacagtgttgctctgttgcccaggttggagtgcagtggcacgatctcggctcactgcagcctctgcctcctgggttcaagcgattcttgtgtctcagcctcccgagtagctgggattacagattataggaacgcgccaccaggcctggctaattttttttgtatttttagtagagatagggtttcactgtgttgcccaggctggtctcgaactcctgagctcaggcagtctgcccgcctaggcctcccaaagtgctaggattataggcgtgagccaccatgcctggccagttttactaagttttaatgttagatgtgttagattgattctttaaatttgccaaccatatgtagctagcagttcataagaattcattcaaatatcattttttcaacatattttgaatacatatgtagcttattcctgctatgagccaggaataagaatgtctaattgacatggagatcttatttcaaaactcttttttttagacaggctgactgcagcctcgaactcctaagctcaaacgatcctctcacctcagcctcccaagtacctgcagagactaccatgcccggctaatttttaaatttttttttagagagataggggtctcagtatgttgcctgggctggtcttgaacttctgggctcaagcaatcctcccactttgacttcccagtgctgagactataggtgtgagccaatacacctagcctgtcaaaattcttatagataatcagaatttgccatcaacaatcattatctgaatgataaattctttctcttatgagacagaggtccagactggcaattttttttttttttttttttttttttttttttttgaggcagaatctcactctgtctcccaggctgaagtgcagtggtgtgatcttggctcactgcaacctctgcctcccaggttcaagcaattctcatgcctcagcctcctgagtagctgggattacaggcacacactaccacgcctggctaatttttgtatttttagtagagacagggtttcgccatgttggtcaggccggtctcaaactcccaacctcaggtgatcaccacccccaccatctcggcctgccaaagtgctgggattacaggcttgagccaccatgcccggcctcaatttttttttttttttttttaagtgaggtgctagaagactgttaccagaacttgggagtcactcctttttcaaaaaatacacaaaacccagtggttttagaagatctggagggcatccctgcccatctcatgagatcctcagcatagcaggcagggaaaaggggttggagagcctggcactgcccctgtccacagctgtctcctttcctaaactaagtctctgatgcgaactctactcctgacctccatcatccgtgtgtgaaatgccttgttttcatgttgactcttcagtgctgggtgctgaattagcatcctgtgtttgttttagcttcttatacagggaccaagtctggaatgtaattaattgagcccttatttgaaataaatgtgttctgggtgttcagagacctaaaaagatgtgagaaaaaaaaaagaaagaaaagaaaaaaaaaataaactgcacttggctgggtgtggtggctcatgcctataatcccagcactttgggaggccgaggtaggaagatcacttgagcccaggagtttgagaccagcctgggcaaaatggcaagaccctgtctctacaaaaattaaaaaaaattagccaggtgtgtttgtgtttgtatgcgtctgtcatctcagctacggaggctaaggtgggaggattgcttgagtccgagagtttgaggctgcagtgagctatgatcatgccactgtactccagcctgagtgacagagtgagaccctgtcacacacacacacacacacacacacacaaaagaaaaggaaagaaactgcacgtcttcaaacagaactatgttctctaatggaggagtgaaaagaagtagggatttggaaagagagcacctaactttgaatttcagctaaccatttattaaacatatgtctttgggcagatgtttgtacctcagttttccaataatatttaacttataaggatgtaggggcaattaaatactgtgcatgctagtattatgtaagttttaaaacaaaaattattataaattaatggagcctactgattttgataggaaaatctataaattccttgagtatcagtgaacacataccgtttttttttttttcttttggtggggtgggggagggtcagggccttgctttgttgctctgttgcccaggctggagtggtgcagtggcgtgtttatagctcactgcagcctcaaactcctggactcaagtgatcctcccacctcagcctctggagtagctgggactagaggtatatgctaccatgtctggctaacttttttttttttttaagcaccaggtcttgctatgttgtccaggctggtctttaacccaggtctcaagctatcctcccacctctgtctcccaaagtgctgggattacaggcatgagcctggcccacaacgtttattctaatgtttatttccataaaatttcaagaacagttgaaaaagttagtttgatgtctttaaacatgttataatatataatagtatacaataacatttgtaatatgagaatgtacaatgctattatttaaacaaaaagctgaataaaaacagatgtaaatccttgtcagcttaatcacataaataatcagcctattgcatagagattgccttgtttcactataatctttggatgtagtttccattcattgcatattttcagatattacttctgactatccttttcttccatgctggagaagctacttctttttctttggatattatttgtatgtgttccaactaaccaagtatttggactgatgaagagttgttatatatttttcagaggataagacccaataaaaatacacctaacaaaaagtatatatgattattttaaaaacaaacaaaacccacagaaaataacaagtgttggtgaggatgaggacatggaggcactggaacccttgtaaagtgttagtgggaatgtaaaatggtgcagctgctatggaaaatggcatacagagctcttaaaaaatttaaaatagaattaccatatgagaagccacattcagtggtgtatgcctatagtcccaggtattccagaggctgaggcagaaggatcatccgagcccagaagtttgaggccagcctgagcaacatgacaagaccttatctcaaataaaacaaaaccaaacccaataactttttttcatgtctcttgaatttgctttttcaagataggcaccactggggaaatatccagagagtggggcaatcacagttttagtctttgatactttgagacactgtaaagtgatatgatgattcagctttgctgtcatcccaactattttccagagagtattaatgttggaccaccttgtggattatgcaagactgtcagtgttgcctttggcactaacagaaaagagtgagtcaagaatatatattgcaaggtagaaatggtcaagatgtggagtttcttgtatgtgatacttttctattttgttttataagaaaaaactagctatttcattaggaaattacagtttgcatatttagaattttcattagtagtgattttaagtgttactgttgttaaaacggtgagtttgttagtttagaaacggttcatctaacagctaacaacttagatttaaataattaagtttggctgggcgtggtgattcacacctgtaatcccagcactttgggaggctgaggcaggcagatcacctgaggtctggagtttgagacaagcctggccaacatggtgaaaccctgtctctgctaaaaatacaaaaattagccaggtgtggtggcacacgcctgtagtcccaggtactcgggaggctgaggtgggagaatctctaaacctgggaggtggaggttgcagtcagctgagattgcaccactgcactccaacctgggcaacagagtgagactccatctcaaaataaaataaaatgatgtaaaataagtaagtttaatatgaatggagagggatatctaggagtatatttcagaatcttttttttttaactactccaaatatctatgcacaaaattcaagtcaactgtgcaagaaaagtcaaagaagtttctttttgttttgttttgtttttagagacaggtctcactatgctgcccaggctggagtgcagtggttattcacaggtaccatcatagcacactatagtcttcaactcctggctaaagtggttctcctgcctcagcctcctgagtagctgtgactacaagtgcccactgtgcccagccaaagcagtttcttggtatttcaggagttcttgtataaatgttaattttcagccaaaaactcaagtttgctacaactatactcaattaatgttctttgttttatttgtagtcaaagcaaggacacaacatcagagggacggcagagaatccttgtgtgtagatctttggtggtgagtacctgggaaaagtcacctaagtcaagatgtcagcataaaaagcattttattttgagcctgaaaagtggaatgagccatctatctaagtgcttacatggcataatgtgattagtagaaaggtttttttgtgactctcttactctgttgcccaggctggagtgcagtggtgtgataacagatcactgcagcctcaacctcctcggctcaagtgatcctcccacctcagcctcctgagtaggtgggactaccagtgcacgccaccatacgtggctaatttttaaattttttgtagagacaggatctcactatgttgctgaattcctgggctcaagtgatccttccgcctaagctttccaaagtgcaggggttatagcataaaccatggcacccagctgacattttgatagatgtatacattgtggaataattaaatcaagctaattaatatatttgtcacctcacattcttattttgggggtaagaacatttgaaatttactctcaacaattttgaaattataatacattattaaccatagtcaccaagctgtacaatagatctgtctccattcttccctttacatttatgatttgctctgtctagaaactgaataagtatcacaaggaggaaaattgagtggttaacaaacatacatgaaaccacgttcaactttactttcccacctttaaggcaacttataaacaaaaattgtaatagtatagtaatgcaagggatatatagcagctaagagaaatgaactaaatctacatatacacaacacagatgggttttaaaatcattgtaattattacaggcatgagccacgatgcccggctgtaatattttatttcttataggaaagataacaaatttgtcaaaatgttaacaatgatcagccagacgtgttcgctcacacctgtaatcccagcactttgggaggccaaggcgggtggatcacgaggtcaggagatcgagaccatcctgctaacacggtgaaaccccgtctctactaaaaataaaaaaaaaattagctgggcgtggtggcgggcgcctgtggtcccagctactcaggaggctgaggcaggagaatggcgtgaacccgggaggcggagcttgcagtgagccgagatcgcgccactgcactccagcctcggtgacagagcgagactccatctcaaaaaaaacagaaaaaccaaaaaaaacatactgttgaatgaaaagcaagttacagattatgtactgcttatgtaacgtttttatttatttgttttgtttttctccttggtgggcattggaaaatggaacattcttaaatggacacattcatactaatagcatcttcatgttctgtctttttaaatgcacacacacagacacacacatatgcggaagaaagggacacactggaaggatacactctaaattcctgaaagtggttacctctgaagagactgggagggtaattgatttggactggggttgaggggagtgcaagggggcttcaattgtatctgtaattttttttctttttttcctgtactttctaggggtgactaatgtaatgttttatttcttttttttttttaaattgaaaacattttttaatggagactgaggtcttgctatattgcccaggctggtcttgaattcctgggctcaagcaatcttcctgcctcgggctcccaaagtcctgggattacagccatgagccatgatgcccggctgtaatattttatttcttataggaaagacaaaaaatttgtcaaaatgttaacaatgatcagttttggatgttgactcatgagtgtttgttatattctttgcatttttctgtcttttgaagatttcttataaataagatttgttctctcctgtgaagattaattttctactttgtgcctggatttggtatgttgtgcacatttcggcccacacaatagtaataaatgagtcttggaacaaaacgtaagcaatcctctgcaagcctgcatgatacattctcactaagccagcctaaaaataacagaagagtaaaagtattattagacagagggaccctcatttgacctttcggccatttggattgtccattcagttaatcttgtcacaatcatgtaattatgaggttggtttgagcttaatgaaccaatatatacaatgaaaatatgctgtcaccagaactgtgccacacaaaggccttgggacataatacttttcttgtgtttgtacatgagatttcccaaagataacaaaaccttttaccaaatatgcttttcagacctattaccctttctaacgaatattcctcttccccacgtcaagtcggcatctcccaaaatatgtcgatgctgtccctttgccacataaatacccaaatgctgcctgatacccccgcaggctacatttgacagtacaatacctgcaaaggcagtggagctgcagagtgctattgaaaagaccattataatctcctctgaaagagtctcaaactgaaatgccagttagtaaaacatataggaaagagaaaaacaaccaggcaagtatataagtgtactcagcagcactcaaaattccagctgagttgaacctggaggtatttttaaaaagttgaatgtctggagaactagtttaggaaacttactttgtcttttttaatttaaaaaaaagttaaaaaagatatatacacttcactccctaaaaaaaaaaaaaagaaaagaaaaagtgagtaggaagtaggggatgtgtacattaatgagggcttccttcctttctctcacttggggagttagtcaaagaccctttaagacttgtttacttttccttctctagaaggaaatagccagcgttttccagcaatgataatagcagtatggacatcatttttaaaaactctagcagtatactattataagaccaaaataagagcaatatagtaaagcattatacattatttctactcctgtatctgactctttctctttcagctagctttagtcagcaggcttatttgctccagcctagggggtttgatttatttactctatgtgaacaggtctgactatggaaaccccttcctcatgtcagaacctttggcttccaggtggagattcattcatgccgtttacaccacatacttgctccctgcctggacaaattggtcccagttccctcaggtcagatgtattctgatgactcccaagtcctgagctgcataacactcagaacctttgcatcagtctctcattgagccctagaggtgcatctctcttcatggttgttgcaaacattactaattgcctcaacctcttaactgtgggtacccatctctagaatgaaaccatcccttaatttgatgtttattgaatacctgtcagatgctgccattctgctaggagctaggaatatagtgctgattaagatagccatggcccctgccttcatggtgcttatagtgtactgtggagcttacacagggagcctgctttaaggaaggatcaggtttcttcactaatgagacctgtacatagatggtactggatgagtgtgtgtgtatatgtttgttagtgggtgggaagcaagacaggaagcaaggaaaccagaactatcaacattgtttaggttagagatgatggtattttgaccagggttgtagcagcaatggaaatagtgagaagtgatcatttgagggtaaacaggactgactggcagactggttgtggggttaaagagacagagataaatcaatgatgacccataatgtgtttgacctgagctactgggtgaacagcagggctatttacagagatgaggatagacagaatgtgtgtgcaagaatcaagagttgagtttttttcattgttacatttgattttccagttgaaaaatcaagtggcgatattgagaagtcacaaatacatgactttgaagttcaaggttagagataaaattttgagatcatcaatgtgtaatccatttaaagaaatgggtcttgtattagtccattctggactggccgtgtgtggtggctcacactttaatcccagcactttgggaggccaagatgggaggattcactcaaggccaggagtttgagactagcctggtcaatgtagtgagaccccatctctctaaaaaaataaagaaatacctgatactgggtaatttataagaaaagaggtttaattggctcatggttctataggctgtataggaagcataaagctggcatctacttctcggggaggcctcaggaagctgccaatcttggcagaaggtgaaggaggagcaggtgtttcacatggtggaagcaggagcaagagagtgaggggagagatgctgcacacttttagatgattagatctcgcaagaactcactatcttgaggacaataccaagggtatgatactaaaccattcatgagaaattcgccttcatgatccaatcacctcccactaggctccacttccaacattggggattacaattgaacatgagatttggatgaggacgcagattcaagctagatgagtctggatgataacaccttcagagagagtgtctcagctgggcgcggtggctcatgcctgtaatcccagcactttgggaggctgaggtgggcagatcacaaggtcaggagatcgagaccatcctggctaacatggtgaaaccccttctctactaaaaaaacaaaaaattagccaggtgtggtggtacatgcctgtagtcccagctactcgggaggctgaggcaggagaatctcttgaacccaggaggcggaagttgcagtgagccgagtttgtgccactgcactccagcctgggcgacagaacgagactccgtctcaaaggacagagagtgtctcaacagagaagaggaccaaggacattgccttgggacaagccaacatttagatcctgggagcagaaagaaaagccagcggaggtgacttagaaggaacagccagtgtgatgggagggaaaccattagtacatcttatccctgcagccaaatgcagtgtctcaaagaggatgaagtaatctcttgcgtaaactaagagcagttaggtaagatgaaaactgagtatcagtcactggtcttgccacaaggtgaccttgacaagtgatctgattggatctgattgaggaggagctgtggatgaagaagtgtgggcaacaaaggaagacatctcttttgaggagttagtgcaaagggagtagagaaataggggtaaggtggatagatggggtcaagtaagatttttaaagacaagaaatattctagtatgtttgtaagttgatgagaatgatccaggaaagaaagaaatctgaggctgcaattgcaagagggaattactacaggatgaaagtcattgagtcattgaaggaatgactccagggcacagatggaggaagcaaggccagttcatccagggtaacgagagaaagcagagcagagaagacgcatagataaaatcggcagatgtggtgggaagacaaagatactttcttctgagggctctgatattctcagtaaaataagaaacaaggtcatctgctgagttcaaagagggagaagaaggtattgaagacttgagaagaaataaaatcaacctcctgtagagtgatccacccactttggcctcccaaagtgctgggattacaggtgtgagccaccgcgcctggccaaaggaagtttttttttttttttaaggaagttttaattaaaaattttatattatttttctcaaatgttaacaatgtattataaaccaaaaataaaattttaaatcctccaactgactgaacgctttttgaagagaaacattcttagaaacctttgggaaaacatttcctactttgaaaaacatggactataagcaaataatgtcttttattatgagaaagtcttttggttcttaattatccttgtcaggaaaaaaaaaacaggataaaagattgctttttaagattgtcactaaaataaaaaatacaacataaaaacaaatttctatttaactcattcctgaatcttaaagaatgtgttacaagttgggctgggcacagtggctcacacctgtaatcccagcactttgaggccgagatgggcagatcacttgaggtcaggagttcaagaccagcctggccaacatggtgaaaccctgctctacagaaaatacaacaattaaccgggcatggtggtacgtgcctgtaatcccagccacttgagagctgaggcacaagaattgcttgaacccgggaggtgaaggttgtagtgggccgagatcacgccactgtactgtagcctggcgacagagcaaaactctgtctcaaaaaaaaaaatagttacaagttaagaaactcttctttctccttagacaacatgttaaaagaaactcaagaaatgttacagcaggtaattttatgacaaatatgtggatatgcccattttcaaaatatgttagaaaatacattttataaacccaaacttacaacacggccttccacaaaataagtgctcaataaagggtaataataacagacccaataataacagcaataatttttaaatttagatatttttagaagtagactttcagcatttcttctacttgttgaaatgaagtcaatgaggttgttttctttagtgtgttaactgagtatcaagaggcactaggaaggaaatgtttgatcagttggctttaggaataaagcatttccctgaagctaccttggttaatatttgcaagtattgtgaactttttggatgaaataccacacagatgcaactcaaaacgaatagtaatacacatatatagttatttcagctctaaactggtattactttcaagtaaactctgaaatctcgggaataaccatctcatggctcttggtaaaaatgatacatgttcattacgaaacaatcaagcacagataagatgatgatccgaggatgagatggtgccctcactaatttctgttcaatgttcaaggtataaccctgaagagagagggttcagggagaccctcatttgactaaaggactcacaatgcaacttcagttcagttttaaaaaataagaaagttatgtttctggcacactttcattttgggctgagattcaaaacatttacaggcattaatatatgttccgggtaccccttgtctttttttgtccccctgagcacaaaataacattacataattcatgattctttttttctcttctctagaccaaaacccagtaaacagaaaacagataaacaaaagaggtggggctagttctctgcagagtgttgtggaggtggggctgaggatggagttttccttctggaatcccagccctgctgttgggagagcaaggtcctgccacataccctaaggagctaagaccacagggatctcagggggttttactgtcactttgaaatggtgtgaggtttcctgcttcatcagaatccctgctgagggggaaattgaaggtgtactgtggaaacctccattgggggcttctgcacagtcacaggaaatggtgagtttgcaggaacttgcggttactgtgagaaaatttgctttggatttttatgtccaaaatctctgtggaattccccagatctgaagccagtgcctgctttggactctgctctgcatacaggttcatctgattgtattttttctcattaattgaaatttgccagctgcaattttatcagcgaaaaccaaattctaatctcgtagatagatatagaaaatgtggctttaaattatggccttaggttatgatgaaataaaacaccaacgagtatgaactgggtctttatgagcgaatctgaaaaataaagtagtaaatctgtnnnnnnnnnnnnnnnnnnnnnnnnnnnnnnnnnnnnnnnnnnnnnnnnnnnnnnnnnnnnnnnnnnnnnnnnnnnnnnnnnnnnnnnnnnnnnnnnnnnnnnnnnnnnnnnnnnnnnnnnnnnnnnnnnnnnnnnnnnnnnnnnnnnnnnnnnnnnnnnnnnnnnnnnnnnnnnnnnnnnnnnnnnnnnnnnnnnnnnnnnnnnnnnnnnnnnnnnnnnnnnnnnnnnnnnnnnnngccagggtgacagaatgagaccctgtctcgaaataaaacaaaatttctcattcttttcaaacacagcatatgttacatgtaatttcatctgacacgtgtcataatgcattgtctttttttccataatgcactgtcttgtaatttttttcaagttttatttctaacaaaaaacttaaatgtaggccaggtgcagcagctcatgcctgtaatcacagcactttggaaggccaaggcaggtggatcacctaaggtcaggagtttgagaccagcctggccaacatggtgaaaccccatctctactaaaaaatacaaaaattagccaggcgtggtggtaggcacctgtattcccagctacttaggaggtggaggcaggaaaatcgcttgaactcaggaggcagaggttgcagtgaaccaagactgcaccactgcactctagcctgggtgacagtgcaagactccgtttcaaaaaaaaaaaaggaaatatgagactctctttttatgagtagaaggtgtctttcacctgtagcacaaagtggaggttcagagcatgaacggattctgtagccaggccacctgactctgccacttgctggttgtgtgaccttgggcaagttacataacctctctgtgcatcatttcctaatctgtaaaatgaggataatagctgggcacagtagctcatgcctgtaatcccagcaccttgggaggctgaggcaggtggatcacgaggtcaggagtttgagaccagcctggccaatatggtgaaaccttgtctctactaaaaatacaaaaattagcagggcgtggtggcgtgtgcctttagtcccagctactcgggaagctgaggcagaagaatcacttgaacccaggaggtggaggttgcagtgagccaagatggcgccactgcactccggcctgggcaacaagacggaaactgtgtctcaaaaaaaaaaaaaaaaaaaaaaaaaaagattatagagaaacaaccaaatgatttttctaatgataaagtcttttagactttatctgattaaagaaagtctgattagcagactgtgaactgctaatcaacagaatctggagacatgccactaaatctgagtcactgtcaacatgtgagtccacacctacaggaggggtggttccttgtatgaaaaacagcctcagtaaatcactgaaactctgctggcaaacatttttaatgcaagtaatgcacctcaatttcacccccctgcttacaatcctgtttgaaacaattccaaacaaatgaccaagaaaccactttggaccaaaagaaagctggtatcttacagtaacaaatactgtagcttgaatgcagttctccatgagaaattagtgaaagggagcatccattcccttagaaatcagttaatattgccattaataagaggttgggcaactgggcacggcagctcacgcctgtaatcccaacactgtgggaggccaaggtgggtggatcacttgaggtcaggagttatggcaaaaccctgtctctactgaaaatacaaatatcaaccaggcatggtggtgggtgctggtaatcccagctacttgagaggctgaggcatgagaatcacttgaacctgggaggtgggggtgggggttgcagtgagctgagatcgcgctgctgcactctagtctgggcaacaagagggaaactccgtctcaaaaaagaaagaaagaaagaaaagaggtaggggaacccttttttatagagctttgctcaggaaccaaaaattcaagtttattttaaacctttcgtctatgcttgaggtatctggatttctgcttttaatatcacattgtaaagatttaaagagaaaacatctctgtagacattgttaattttgtaaatactgatgtaatttcttgtgtttttccatatcatctactgaaactaaatagctcagaattaaaaaaaagagcccttttattttgccagtctataaagcttctgatgacaggtagaagaacctggtggttaaggacttaggttttgaggtcggtggatgtgagattgaatcgtggacaggttttgaggtcggtggatgtgagattgaatcgtggacaagatctcagtttgtataaaggcatgtatatcggcctcatttatacatattcttagagggctgtgagaagtaaatgtgtttatatgtatagaatttagtacccatggccaggcgcagtggctcatgcctgtaatctcagcagtttgggaggccaaggcgggtggatcacttgaggtcaggagttcgagagcagcctggccaacatggtatgaaaccccgtctctactaaaaatacaaaaattagccaggcatggtggtgcgtgcttgtcaatcccagctactcaggaggctgaggcaggagaattgcttgagcccaggaggcagaggttgcagtgagctgagattgcgccactgcactccagcctcggcagcagagcgagactctgtctcaaaacaaaaacaaacaaacaaaaaagaattcagtacccacgctggctcagatgttgatggttactgttgtgaatctggctctacggggaccagtcacttcatcactctttaaagacaagacactcctaaattatctaccaggccattttatttagaaggccttaacatgattgatacatttaatttaattttatttttttgagacagagtgttgctcttgtccaggctagagtgcaatggcaccatctcagctcactgcaacctctgcctcctgggttcaaacgattctcttgcctcagcctcccaagtagctgggattacaggtgcccgccaccatgcctggctaatttttgtattttagttgagatggggtttcaccatgttggtcaggctggtctagaactcctgacctcaagtgatccacccacctcggcttcccaaattgctgagattataggcatgagccacctcacctggccgatgcatttaaatgtgggattaaatattcacacctagttcaagtgttcacatctgtacttgaaactaaaacttgttaacaaggcataaatactgtattagtctgttttcatgctgctgataaagacatacccgagactgggcaatttacaaaagaaaggtttattggacttacagttccacatggctggggagacctcacaatcatggcagaaggtaaggaggagcaagtcacatatcacgtggatggcagcaggcagagagagctggtacgcggagactcctgtttttaaagccatcagatctcgtgagacttattcactatcatgagaacagcacaggaaaaactcatccccaagattcaattacctcccattgggttcctcctaggacacatggggattgtgggacttacaattcgagatgagatttgggtggggacacagccaaaccatatcaaatactgtttaatttgagtctaggagaaatcttaaggccttaaacttagactttataaaagcagaggctagctccatctggactgtttattccttcagaatattatgcctacttgtattcccaatgcctgactcagggctctcccatagtcagtgctcaatgaatattggtaaggaaaaaaatggttcagtgaggagatttttgcagtaattcaggtgactgatgacatttgacctttgtgaatgaatctccaattctgcaattgggtggattctctgcctataggtacaagaggaagaggacgagaaatatttcctgttctctcaataactttccaaataacatgtcataagaagcctcctcattctactctccaacatattaaaagcctaggattgagccaggtgcagcggctaacgcctctaatcccagcactttgggaggccaaggcaggcgaatctcttgagctcaggagtttgagaccagcctgggcaactaagtgagacccccgccctgccaaccccctctacaaaaaatacaaaaagttagctgggcgtggtggcatttgtcagtaatcccagctactcaggaggctgaggtgggagaatcgcttgagcctgagaagcggaggttgtagcgagctgagattgagattgtgccactgcactccagcctgggcgacagggcgagactccatctcaaaaaaaaaaaaaaaaaaaaaaaaaaaggcataggtccatagccctttagaactggaagaagccttctaggccaagcccttcatttgaactgagccttgacgggtattagccgttagccatttgtggaaggtcgcacagtagtcaggactggaagtctggtctttgaaacctgtcagtccacggtcatttcacctgcctgtttgtaaaacaatgtcctgttacttaagtatactttttaataagaaaaactgggtgtaagcaagagtatcagagtggtgttctggtgccagcagttcaacttctgcagcgtgtacttcacaggcacaggtacttaggacgtcgcacaggcacaggtacttaggacgttgccccgccgagactgtcgttcatatcgcgcccacctccgggtaacgccggtaatgctgacctagctccattatttgtattaatttatttagctagcagggggaacggctgggtaatgcagtctcagctgctggaggggaagaggcaagactccgccggcgcccaccatcagagcgtgacaacaagcgggaccggaggttgggaaaaagcacagggacagaatgaatgtgtgcatgggggagctctgctggggagagggcaagaggctgtgatcagattatctgaggtttcagaacttttatataaagaccaaggaaccaaatgaaaatccaactcttccagggagccctggaaagttcaaaggacctcgtttgagggagcgagtccccgcagctcgtgcccacgtctccctcgcgcttcccccaggacaggggccgccccaacccgggcacgctgagcccggccgcgcccctagccccttctctctcggcctcctcgtcccgaagggaagcacaggctcgagcagcattcggggctcatccatcagccgcggaggcaaagggggaggagagaggaggcgggaggcgggaggcgggaggaggagtttctgggcggccgagagcccccggtggggccggcggaggagcgcccttccccccgcgcgctgattgctgtggcgtcctgcccgtccccgcccgcgtgtgtgcgagggagggcgagtgcgccgggtcggcctgatgggggtaatcgagggtttcggggacgccgagcggcactttcctcttcccagcgagtgaaggagggcagtcggcggctctcgcgccccggccactttccctgcgcgattcccggagctccctgcaggaggtgagagtccccagcgggtccggatggcgtagttttgccgcggcgcagcagctgccggagctcgccgccgccgagcgctgggcggggaaacttgccgccgctttcctccaacttgctgcgggtggatctccgctggacacaccgcctccgaggtacgtgccggcccagccccgcggcgctgcagcccgcccgggctgtgggctctgcaggctgcgcgggtgcccgtcggcgcggcgcgggctgccagtgcctacttaccggccagggtcgctccagccgccaggacctccggccttgggagggaggcgctggtggggcggtgtttaccctccggggagcaggcaccggtggccagcggtgcgtgggcagcggccgcacggggcaggcagtgcccccggcgatgcgcagtgctggggaggaattctccacgcccgccctcactcttcctctccgcgggtccttctgacccctgcggggcgcggcggccacttccctccgggcgcgtgacagcttcggtgggaatggtttgttgtgggttcgcagtcaattgccgtggcccaggctgtggctcccggactcgtgcacggacgcggtttgcgttccccgctggccgcgccctcagggtgccttgcgggctgagccgcaagctgcagctcggcccccccccgccccggtttattttgaaggctctcttcttgtattcatttggttaggacaaacttggaaatcttggactgtcgctagaagaatctgcttgcagacttgatcttattagggcatttgccccgctttgcagaatcgcatagtgtcaggagccgacgtgtcaagcatgaattaccttggcaaagtagaacttagtggatttggtgtcctcacgaaaagctggaagaagaaaaccgttccatttccctagctgtgaagtgaggatagtagtacttgccccgtaaagttgctgtgagcatctaatgatttaatgtgtgtgaggtgctacaacagtgcttggcaccgagtaagcaccgcacggaggttagcgctgcttgccgctagccctgcggtggcaggataggagcggcgagggcagaggatagtaggagtgacaggctgtgctggggaaccaggcgtattctgagttttatgtccttccgaagaagtgagcggtttgggagaagtctccacaggtagtaaaaacacacgtcaagaccgtttcttcttcctgaatgcagagtgcaaacagttacttcagtgtgaactcagttgtttcttttggataataataacagctaacgttttctaagcccatactgtgtgcacttaatcctcacagcatctctatgggaaaagcactattaataaccctattttacagataagacactagaggttaagttacttgtccaagatcatacataactttctgttagttctgactccaaagctaccttccttcctcagcggagagcggcaagtgcaggccgatttgtgtgtacatagatttgtgtgcatagtccatgcatcttctcccatctttcagctttctatttgagctgaacgcatatctcttgaaacacacataaggtatctgtgatgaatttaggcgattttacatacttatgagggtgcccaattaaagttcctctgaaactggccccaaataattataaatagaactctgacttgtattaattaacatggaaatttttttttttttttggtgacagagtctcgctctgtccccaggctgcagtgcagtggtgcgatctcggctcactgcaacctccacctcccgggttcaagagtttctcctgactcagcctccagagtagctgggactacaggcgcgcgctaccacgcccagctaacttttgtatttttagtagagacggcgtttcaccatgttggccaggatggtctcgatttcttgacctcgtgatccacctgcctcggcctcccaaagtgctgggattacaggtgtgagccaccacgcctggccaacatggatctttattcttaatttcttttattaattctccagacattgttgatcaccattacttggcttccttaggaaacagcttggggttggcacaggaggcagggaaataattcttacccccttaagggctattaacatgaaattgatttcatgccattgtgtcagttaaaggatgttgctctatttcttgctgttctttgcttttggctttatttctgcattgtttagtgtttcaaggcttgagcgttttttttttttggcccttcagtttgacatttgtcaactttaatttttcctgttttgatggaatctgaccgttacacggcagctttgcctaacaactgttgattcagctcatgtttttaaatataaaaatcaccaacatagttttgaatcccagcacttcaaaggcaacccgtggggagttcattgttattttgaatattagtcaatagggggagcataacacactgttgatatctataaggcgcataaacccgtttttagagtattaaacatatagtttgaaaggggagggcaaaatatctagcaaaataactaagttgcttttggagtttataatggaggactagatttaatttgaactgattaagaatgaccttgaggacagggcctgtatgttgaatatatgtcaagaactccatggtggctggacagatagataaacacacatatagttttttttcaatttgtttccttaagtggtgtgtaggccaggcacagtggctcacacctgtaattccaacactttgggaggctgaggtaggaggatcacttggccaaggagttcgagaccagcctgggtaacatagtgagacccccatctctttaaaaagtgaagtttgtatgtaaactaattttgtgtggtttgaataatatttcaacttacctgggagaaatggaaatccagaggaatttgttgtgaatccttttgtaatgatcctcatttgtcttttgtagaaaactgaatataatgaatttgttctcagggaggttggtgtgttcacaatcctgtcatcatctttcattaacatcttctaagtgcaagacaataggggatcagtaatcctaaataacagcagttctattactgtgcattcctcagaggcttacgttaatattcaagtatagtagtagttcagatgtatcatatttgatactagtataggtgtgatgtgtctatgaatactcatacttgtaaacataaacaataagaatatgcttgaaaaaatcacacttgacatttatctatttatttatttattttttgagatggagtctctcgctctgtcgcccgggcgggagtgcagtggtgcaatctcagctcactgcaagctccacctcccaggttcacgccattctcctgcctcagcctccccagcagctgtaactacaggcactcgccaccatgcccggctaatttttttgtatttttagtagagacgggggtttcaccgtgttagccaggannnnnnnnnnnnnnnnnnnnnnnnnnnnnnnnnnnnnnnnnnnnnnnnnnnnnnnnnnnnnnnnnnnnnnnnnnnnnnnnnnnnnnnnnnnnnnnnnnnnnnnnnnnnnnnnnnnnnnnnnnnnnnnnnnnnnnnnnnnnnnnnnnnnnnnnnnnnnnnnnnnnnnnnnnnnnnnnnnnnnnnnnnnnnnnnnnnnnnnnnnnnnnnnnnnnnnnnnnnnnnnnnnnnnnnnnnnnnnnnnnnnnnnnnnnnnnnnnnnnnnnnnnnnnnnnnnnnnnnnnnnnnnnnnnnnnnnnnnnnnnnnnnnnnnnnnnnnnnnnnnnnnnnnnnnnnnntttcctttcttgtttcttgcgtattatgtagtatttttttattatttatttatttatttatttatttatttttgagacaaagtttcgctctgtcgcccaggctggagtgcagtggagtgatcttggctcactgcaacctccgcctcccaggttcaagagattctcctgcctcagcctcccgagtagcggggaccacaggtgcatgccaccacgcccgactaattttttatatttttcgtagagacggggcttcactgtgttagccccgatggtcttgatctcctgacctcatgatccacccgcctcggcctcccaaagtgctgggattataggcgtgagcgactgtgcccggccccatattatgtagtattgatttacctttatttcatttaccacgttagggtcccatggatcctattttaaaataactttcaaaattagttgagtcccttctttttaaatcttagcattgcgcttatactacagagtggcatttatttaggatctcatttagtcttctatgctttgctctagtttactcgagtaattcaacaaacacttataacctcctactccctactaggctatggtttctggtcttggagcttggcaaattaattgtccttattcagtgctctgatgactgggggccaaaatgccttcaggttgcttagggctttcttacagaaagcctttcgttggcttgaaggaaagtgttgttccattgtttttaagactcaaaagaattaatttttctctcttgcatgcaaacttggttgtgacttgtaaaagtcaggtgagtgcttgtttttctgagggcagaatctgagcctaagagcccagggaactcaactgtcctttgagttttaagaaggtgatcactgctgacttctttagtatataagtgaagaccaatttcctggcttcaaaaatctgtgaaaggtcctgactttacattttaagcttaacagacagaacagttagagtttagactgtgactgtgtaagtaataactttgctgtaatattttgcctggatgattctgctctgtggtcattttgaattacctcccttcttgatagttcattttgaaacgtctttttgtggtgctttcattgctgttggataaaaattgtaattgtcagatttattttttatttttatttatatacttattcatataaaatatgtaaatatatgtaaaatctcacatatatataatctataactatatattgtataatatataatatgtatatattttgagacagagtcttactatgttgcctcggctggtctcgaactcctgggctcaagtgatcctcctgcctcatcttctcaaattgttgggattacaggcatgagccactgctcctggctgtcagatttattagctactaaaggacagtcttctttttcagtcttaacagttacttaaaagtgattttattgccatttccatcagtctactggagcatttttcttatatttttatttttatttttattttttttgggacggagtctcgctctgtcacccagggtggagtgcagtggcgcgatctcggctcactgcaagctccgcctccctggttcacgccattctcttgcctcagtctcccgagtagctgagactacaggcgcccgccaccacgcccagctaatttttgtatttttagtagagacagggtttcaccgtgttagctaggatggtctcaatctcctgacctcgtgatccgccgtcttggcctcccaacgtgctgggattacaggtgtgagccatcgcgcccggccatatttttaaacttatttaaaacaattgtaaatttaaaaaatgttaacttttttgaaatttgcataacttgagttagataaatgtttttaggggcctttaatgtaaaagcagtcttgtattgccactaggaatataagcaatttggaatttaagagtgaatctaggttatatgaaaagctaaccttaaacacataatagtgagccttcagcagattgagtgagggcatttctgtaggaagaaaattaagtgtaccaagagccatagcagtaacttctctggttctgcatcttcagagtaacacttggaatgatagcattgtttctttgcagcatgtcataaaacacaagctgttgctaatttgttcagtgtctagtcaagctgaaataaatcaacacagcttggaagggccttacaagaaggatctgggttcatttcctgggctctgtccaggaaatatagaaatataataaataaatctaggaatataaaatttctagatttcttattttatatcttttgaaatagcacatttgtttgttaactgacattgagctttattttctctgcttgcaaagtccttgcttaagaatcagcacaaatttccaagcattcttcctccccacttgaataatgattttgatgtcttgctctctcaaccaaaatgtgtttttgaaacaacattgatataaattctgcatgaggctactgtcatttggaacttattcttcattttttattcttcagtttttcaggccaaagatgaagacttaataggctgacaactgcttatgagggatagagaccatatttaaaatggaaggtctagaacaagagccccagaaccatgccttcaggccatcctaatgtgccctgctgaagataattttttggtgtcggggggcagggcagggagcctaatgtctggtttttgtggtggtggttcttttatgttgaaatcttcttccatcctgggaagaggattcagttatatgtagagcctagcaaagttgatttttagaattagattttaatggttatttttttttttgagacagagtcttgctctgttgcttaggctggagtgcagtggtgtgatcttggctcactgcaacctctgcctcctgggttcaagcgattattgtgcctcagcctcccaagtaactgggattacaggcgggggccaccacatctggctaatttttgtatttttagtagagacagggttttgccatgttgtccaggctggtctcgaacttctggcctcaagtgatctttccccctcagcctcccaaagtgcagggattacaggcgtgagccaccatgcccgcaagcccactttaatgttaaactgttgccaagataatttagaattaagtctgaaatgttagctctatctttacttaaaaaatggttataaagaagcgtatactttctggacattggactcctagtgaagggggcctttggagttgggtgttgtttgcaggaggacgaaacacctgcttttctgtccttccaggcacataattcatttctctggtatatgccgaaggtcaggttttttgtgtaaaattgctgatggatcatttgtaaaaacacatttaagttgattagtccttgaaaaatgatctttagaaaatgatctttacagatactagtccttgagctttcctgtggatcagattgccttgggcgaaggtctgcagtttcacaagcatgactcactaccttttataggtgagaacatcaaatgggccaggtggagggtctagtagaactctggatttctttttaaatttgtatcatactattttgctaatggaaacttgatgaatacttaattccatctggcaagtgaaaagggtcccttttgggagtattcgttttgttagcatttttagtgatttattgttttgacagtgtgatattggtccttggatgcaaaaatactctggagactatttggaaatttcattttataattaactaactgtgtgataattgctggagcagaatgtgtgtttttttttttttcttttcattctggaaggttatttgaggtgaaaaacttagattctaatcacaaaggcttgtgttcatgtggtaccctgagtacttttgtaagatactcactgtgttgctgtgagttatctcttttatggttttttctttaaaacaaaactcttctgagtctccataaagaataagtatctcattttgttatattagattttgtgcagttggctggcaaattaaatttaactttgagggaaagcaccattgactcattacatacattttgcatcattgcagcgtaaggtcttccctatgtgtgtgggagaagtttctgatctaaatgggcatgtttcctattgctggtctatcttttagccaaagcatttctgaatagacattcctattcattttcttattttcgagactttagagagattgctacttgttatgtattcgtgataaatcatctgaatcctgaaaaaaatacttatgccaacagcccattttgtaaagacacttgtctttgagcttttaagctgtcatactcattattcgttacaatagctgtacagccattggatgtatcatgtttttgacacaggagctaggggaaggatgacctacttgttgcatttcacatttttccatatttatatcttttttcaatttgtggcatctttatttcattgttagagtggttgttctctaagacgttccaggttttaatttcattcactgtgtgggctaaataaggagctttcctgtagaaccaattctactaaattcctgaaaatgtcagttaaaaattagccaggcatggtggtgtgtgcctgtagtcccagcttctcaggaggctgaggcaggaggatggcttgagccaggaggtcgaggctgcagtgagtcatgatcataccactgcactccagcctgggtgacagagtgagaccttgtccctacccccaccacacacacaaaaaaagaaaatatgaagaaaaaagaaaatgcttccaaaaagtatcccatctagataccatgctggttagggcttttggtcatgtttgaatgggacatagctgaacacagagcaggatttcaatgggtaggctaggaaaaggagaggagtgtctaatttgttgggagaaaatccacttttgcataataataggggatttacgtgttttctttggagttaatatgtatttcaagtaggtagataggtaagaggtttgcaaaaaaattttgctaaggttgaggttctgtagttggcaactcttataaccctgaagatcctgttctctaaagccaggaaaaagcagtctgtttccaattatgtatcacaaaaaatagtgaaattaagccaagaaaaatgatcatttgggagttgggttgcttttttttttgcagagggtaaaggagaaaggactgtagacacacattttaaagaatctgctagtttttctgttggctttcagatttttctcaaatgctctgtattggaaattaagaataattttaggattaaaggccttttcctccttcggcttctttttgtttctcagagagcaaatagaagagcatttaggcagtttttgctgacatgaaagggtttgggtccagtgttccgggacccagcttgtgtttttggtaaagccttttcctgcctgaatggtcccaggttatgggctcacagcatcatacctggtagtggtgctatggtttttgttatatgaatttttttaccatgctttgaactgaaatgtagtccctgctgcctagcattattctgctggaggagaaaactagggatgttagtgtgggaaaggtatggaggtgcgaagcctagcatttggatgatgtgtgggtgaatatattgtcctcagcacttgtcagaagcaactagcctttcgggatgcctactgctagtttcaggattagtggtcctgtgagacctaggtgttaactaagaaatctcctttccactgccagaagatcagccccggcaggtcttagttcctgtttctcacaccttacacctccacagagtgttgaataagactttcctgatgctgcataatctttgataactcttagtcttgtcactgaggctaatgtgttttagctcttggtgcttttcttctcacctcccatttactcttctgcctgctgctggctcccacgcccaccacacccccaccacacccccatgaggtgctagaagaggtgtgaagtacggagtgcaaagttgcatttgctgctttactatcctttttcccccatttttttttcttggtttccctgaaacgagttctcctggttttcctcttatgttccggatgtctcttcagtcttccattttgtttctttttctttcttttttttttttttttttttgagacggagtctcactctgttgcccaggctggagtgcattggcacgacgttggctcactgcagtctccgcctcctgggttcaagcaattctcctccctcagctgcacactcccacccccccccccccgagtagctgggattacaggtgtgcgccaccatgcccagctaatttttctatttttagtagagacaaggttttgccatgttggccaggctggtcttgaactcctgacctcaggtgatctgcctgcctcagcctcccaaaatgctgggaatatagacgtgagccacagtgcccagcccagtcttccttttcaatgcttgatccctatgggttgacattttccaaggttgcattttcctttcctcctctcctctcccctcttcttttctttttcttgtcttttcagtctacattgagttgctcatatttctgtgcttcaatatcagcagctccctgttttttcacacccatatttccaacagcctatcggacagtgccatctggttgttctgtagatttttctgttacagtccaaaagccaccatattacttctctgtggtccacagcctccacagtgtcaccttctgtatttcccatgtccctccttctctatgggggttcctgcttactcttccaggctctcactgctgccagctcctccagtggggcttcatgtggctcctcctggcaggtgcttctcttgctgcctcgtgagaatgttgtttttccttcggcagattccccagagcaggattgagtcttaccatcttggtatcctaggtgtgtagcatgggcctggtttatagatatattgtcaaatggaattcttcatttcagcccacttcagttatggctttggggaaagatcaggcttacagttgatataaattatagctatagaaaagacacagaaaatcaactcagaatcatagagtttagggttacagtggggcttagaataatcttccttaagtttctctaaagatgagaacaaccagagagcagtgtttctcttcttgcccctctgcagcctagttcccacccaatagccagaatgattgtgataaaacctaagtcagattccttcattcccttgcttaaaacactctaggctgggcgcagtggctcacgcctgtaatcccagcactttgggaggctgaggcaggcggatcacaaagtcaggagtttgagaccagcctggccagcatggtgaaaccccgtctctactaaaaaaaaaattagcctggcatggtggtgggcgcctgtaatcccagctactcgggaggctaaggcaggagaatcgcttgaacccaggagacggaggttgcagtgagctgagattgcaccactgcactccagtctggtgacagagtgaccaaaaaaccaaaaaaccactctactgtttattcttgtctttctcagaataaaagccagaactcttacagtgatctgcaaagccctgcccaaccagcccaccactcttatgctggtgacccagttgacttccctcttgtgctctctaggctgctcaatctgctccagctgccgcacctgactgttggtccctgagcacgccagatacgctctgtctcagggcctttgcatgtgctgtttcctttgcttggaatgtttttccccaaatagctacagaattcgcttctgttaggtccttactcaaaacagacaaaccaaaccaaaaccccacacacatactttgtctctcccttttctgctttgttttcttagcattggtctctatataatatataattatgtatcttgtttatagtctgtctcctttagctagaatgaaagctccatcagggcagggatttttatgttttgttctctgttgaatacccacacctggaacagtcctggcatgaagcaggcacttgataaacattattaaatgaataagaagcattttatggatttcttttttttttttttgtggcagggtctcactctgtcacccaggctagagtgcagtggcacaatcttggctcactgcaacctctgcctcccgggttcaagccattctcctgcctcatcctcccaagtagctgggattacaggcacatgccatcaggcccagccaattttttttgtatttttggtagagacggagtttcaccatgttggccagcctggtcttgaatttctgatctcaagtgatccacccgccttggcctcccaaagtgctgggattacaggcgttagccacagcgctcagcccattttatggatttcttatagccccagttataggtgcactcagggcattaaaaagggaaaattgggccaggcgtgttggctcaggcctataatcccaacacttttggaggccgaggacaggagtctcgaggactcctgtcacttgaggacaggagtttgagagcagcctggccaacatggtaaagccccatctttactaaaaaaaaatacaaaaattagctgggcgtggtggcaggcacctgtaatcccagctacttgggaggcagaggcaggagaattgcttaaacctgggagggagaggttgcagtgatctgagatagtgccactgcactacagcctgggaaacagtgagactccatctcaaaaaaaaaaaaaaaaaaaagaagggaaaattggccaggtgtgatggcttacccctataatcccagtgctttaggaggctgaggcaggaggattatatgaggcaaagaattcaagattagcctggataacatagtgagaccccatctccataaaaaaatcttaaaaagtcagctgggtgtggtggggcacacctgtagtccctgcttaaagggactgtagttgaggtgggagaatagcttgagccaaggagttcgaggctgcagtgagctatgatcatgccactgcacaccagcctgagtgacagagtgaaaccctatccccccctcccaccaccccgtcaaaaaaagggaaaaccatcaatctcggggaaggagaatctgatttttaaaaagcctcatttaagactcgttggactagaacactgacctcgttttcatgtctgactcaaagcagcacctgtgggtccccccatccttacaagtggtttgggaagactcccattttacctctaacaggcatgggcttgctgcggtttctctctgcctgtggtttgccctttaacccagcaggctacaaagatgaaaagcaaacacaacgttaaagaaaagagctagggaagagggcagggggaaacagggcagaatttccttgcagccctgacatcttgccttgtttctgtgcccatccccttgtctggttacacagtcccttccagagctgccttgcttgggggctgtgctcagtcttgagacttttaggccagatgactcttgagttttgctttgatgttgtaatttctttgaagagaaatcttaattttaggcaaaaaggacattggagaacggattctttaaaattaaattaccatctttcgaagtgaagttttaacccttctcaagataaggggttgtccctgaaatttctgcttgcttctgctgatgatgctagtgggaagtcaggattggcaggaccccatcttgtgaaaccaataccgtaaatcctcagggcaataaattcagctctgaagaagtgtcagactcttatgggtagggattatgtggaatgaagtacataatttgtattagtgtaatagtaaagttagaggaatttgcctcctgctcttattgagataacatcggcatggttcctacagggataggaagcccagccaagaaaggcaaaggcttaggaggaagctattggccatgtacaaagcctgcagtgtcattcaccctgggattcaaaggtatcacattgaaaataaattgtctagaatggagctgagttatcagtgagtagttaaaaataatcaaagctaccatttcctgaattctaacaacatactaggaagtaagtgctttatttattaatttagttagtcatcataacaatcccatgaaggaggtagaatcattatctctactttatagatcaggcatggagctttaagtaagttgcccaaaattatattgcttagaaaaggcaggtgggggatttgaactcaggtaggctatgggggccccgcactttccactatgctgtactgtagtctgcttctaggacaaaccaagcatgctcttacctcaggacctttgcactcactattcccactgcctgggaggtttttcctttagatattgtcatagctttatctcttacctctgtgcttaaatgttaccttgtctgggaggccctctctgaccaccctgtctaaaatagcatccctcctgtcatcactctctctccttaacctgctttattttcctttcctaggtcttctcatgccttgacatattatttatttgttgtcttgtctgtccccacctttagaaggtaacctatgtgaaaacaggagtgtgtttaatttgctgctatgtgcccacctccctgaacagtgcccaggacagggtaggcgctaataaatgtttgttgagtgaatgaatgaagtaaactaaaactgctgatcaaggcctgccaccctggtttcagaacaaaataatttgtcccttgtgccagatctcatcagactacccaccaccagaaagtgagtgtccatgcagggcctggttgatgtctacagtggcttagtaataggcacagtccctatcttttttttgaaagtcagctgtttctggaggatctcttgtttgtagtagttaagagcatgggcgtggaattagacagacctaggtttaagtcctggtgccaggatttataagctggtgacttggggttgcttagcatcttttttttttttttggtgacagagcagagtcccactctgttgcccaggctggagtgcagtggtgccattgtagctcacttgcagccttgaacttctgggctcaagtgatccccctgcctcagccttccaagtagctaggactattggcatgcgccaccatgcctggctaatatttgtgtttgtatttatttatttatttattttcagaaactcctgatattcaaattatttttattttttctatgtttcccaggctggtcatgaactcctggcttcaagggagcctttggcctctgcctcccaaagtgctgggattataggtgtgaaccactgtacccagccttacttagcatcttgaagcctcacctttctcactacaaaatggagtaaagggcatctgtctccttgtattgttgagaagattaaatgggaaattgtgatatacatgataggtgttcagtagatgataacagacattttgtgggttcagaagaaagcagagatgtcagcttctgacaggaaggggaatcaggtatagacacttgatcaaccacagaataattacaaagcagcatgtggacaagtcttggctttgtaactaagtagctgtgtaaagctgggccagtcgttgagcctttctaatttttggtttgctaatctgtaaaattaaagggtcggagtagatactacctgttctagcattccaagttggctctgactagaagataacatggaacaaattatacacaaaatgataagtgacagaatgttcacagtaggatgggattaatcagaagtctcttttggaatgaggtgaggactattggtagagttcttggactttgaggaatagcataaagatggcagattgtgataaaatggttagatctgacaaaattcaggttttttgtgtgcttacattgttgggaagatactgcatttaaataatttttgtttacgtaagttatatattaaaatagctaatgtagtattaatattctatttattcttatgttgccaagttgaatatttttcttggataacacttttctgttttgtgaagttattcctgctagcctttacataattatgcatttcagatttccacaagtgtgtttgaagtctcattttctagaagggattcaggattattagtccatgtaatgacaattatagtatgatatagaataaaagattttcttgtttaatttcttcatattagaaatgagggaagtaggatgcagaaggtctgagctggtaaaacatgctgatggtcgcactcctgcctccttttcctttgaggatgcctgaggttcttatacataactcttgttattgagaaatgttctaatttatcatcctgctgtactattttttcttttttcttttgtttgagacggagtctcgctctgttgcctaggctggaatgcagtggcgtgatctcagctcactgtaacctctgcctgccgagttcaagcggttctcctgcctcagcctcccgagtagctgagattacaggcatgtgccactacacctggctaattctgtatttcttgtagagatgtgatttcaccatgttggccaggttggtctggaactcctgacctcaagtgatctgcccaccttggcctaccaaagtgctgtgattacaggtgtgagctaccactcccggcctgtactatttttattgtagtgtgcacagtagtatttatacctgtagtccactgtggtaccctcattagatgcccgctgtcagccaagtgtaggtagactgtgatccgccttgctggaattaagacagtgggaaagccatacttggaaggaaataattacataataattacaacctgaagggttgtactgcgttctaggtgtccaagtttaacttggtccaagggaatcagaggaggcttccttcaagaagtaaggcttttgctgagacctgaagatgttagaaagtgaccatcctagggaccatggagggatgttgagttccgatatagtgaacatcacttttggaaggtgaggacttggcccttttgtgggactgaattgacactagtgtggctggagtgtgcagaagatgagcttggactaactagacgatggttggtggccatgtgaagttttgctgtttatctggacggcagtgggcaaccattgaagagttttaattcttagtgtttcacatgcctgggctctaaaccaccacacctggtgcacttttaaattttttgtagagacagcgtttcactatgttgtccaggctatcaaaagcttttttcaatggccaggtgcttgctagggcctgagggaggatgactgttgtcctgagaatattctgatatgctgaattttgctcgaataattacagctttatgatttaaacctttttgatgacagctgattcctcattctaggtagcttggttggtttggtggcagtgccagaccaagttccacagcccccagctgaacccctgcagctaattgggaatcatcaaatagaatcgagaagggccctgcagccagatccctgtaacttataccagaaatgttgaggcaatggcttcaccaccatttggacagttttgctacattatgagtatctttagaacccataccttgtatggaatttggaatcatttttttgtgatggagggaatttttgaaattctagatgataaagtctaatctcaaaaataatacaaaatttgctataaacaactatttctgttgccttgctactagtagtttgcttattttctttttggaagtctaggtatattttaaccataaaaataccaatgactattatttatttaaaatagacagtgtggggccgagcacagtggttcacacctgtaatcccagcacattgtgaggctgaggtgggttgatcacctgaggtcaggagctcgagaccagctgggccaacatggcgaaaccctgtctctactaaaaatacaaaaattagccaggcgtggtggcacatgcctgtaatcctggctatttgggaggctgagacaagagaattgcttgaacccaaaggcagaggttgcagtgagctgacatcgtgccactgcactccagcctgggtggcagagtgagactccatctcaaaaaagaaagaataaaataaaatagactgtgtgggccaggtattgttttaggtaccatgcctatattctgtcttatattataatcaaaatattgctaccattttacagatgagggcgtggtaggggctaaatgacttttccaatgtaacacagctgggtaagccaggttttgaacccccaaatacagttctttattaattctagcttaaaagcagacacccttataaatgaaaaggtacagaaacctttggatgcaaaaatcttaaatgtgaaaaggtggttcttagagtattgcaagggtgggtgaaaaagccatcctagtttgtgagtttgaataaaacatggtcttttccaactttgtgaaatgtgtcaacacccaccctccctttttcctgtattttccttgggagtgaggtgtgttgtgcttgggatagatggaagggctcttaaggacggactgaagttcggccccaaggaaaccaaggctgctggggccagatttgttgatcatgctcccagccaggaatgagggtgggcctgctctggagggacagcccaccttgcctctgaaggcagccggcacagaacaggcagagtggagtcaggcttctctgctctcctcgtaccctctgtgcgtactgcttcccccgtgcctaccagtacaggtggttccagagtaatcttcctcctttcttttcctgccactggcagccacagaatgttgggactaattaatctgatacctcaggataataaatctctttggtagaaacagcttgctaatgataaatgatagttttaatactatacatgcacaatctcatttgattcttgcaacaactctgtgatgtagctaagttttgtctgttacactctttacaaaggaggaaactgaggctccattctgatctaaacctccatcctttcttgtctgacatgctgtgagaatctcaactgattgtccaggcagtctggcctcccttcagtctgttctctgtacagcgtgagggaaatctttagtaatcccatctgatcacgctattccctgtttaaacccctccttgaacttattcgtcttctctttccctttcagctctgcagctctcctccctcctgtaatgcttcctctgcctgcagtgtcattcatcacctgacttttaaaatcttcgcttatcctcaggttgcgtatacttttcctttagagctctgattatatcgtgtagttacatgtttgtgattattgtctgtttatctcaccagcttttaagcccacaagggcaaaaaacatgtctccttggccactgcttagcagagtaagcaataaagatttgttgaaaggagaaactcaggaaattaaatgtcttgtgagaagtagtaaatgatatttttactcggatataagctccctgagggcaggatttttggcgtctttttttcattgctatatccctggcatcttgaacagtgcctggcatatagcagtaatatttattgaatatcagttgtgcttggatgtgattccgaagatttcttatccaaatctaggactttttctctcattgtgccaaatctatctgaagatggggattagtttagttctgattctgaatcaactcatggatgtagccaggccatgttagccatctaaggggaagctactaattttttcttactggtttttagcctattgccagacatccattttgccacagtttttctcttagatagagcaagatttctctcctcaccttagggaatattgtacccaaccagatccttttgaatattggtttagaacgtgatggttttgaggattcatttggatgggattttttcagctaatcttggtctttacctgtgcactctgttgggtcatgagggcatgtggggcagtatgctcagtttaatggactcagaaataaacccaggggatctctgaaattagcagaattagcagcacatttgtttgctttttttttaaacccattaagttctaagaattttcttttttttttttttttgggagacgtagtctcgctctgtcacccaggctggagtgcagtggcgcgatctcagctcactgcaagctccgcctcctgggttcacgccattcttctgtctcagcctcccgagtagctgggactacaggtgcctgccaccgcgcccggctaattttttgtattttaagtagaaacggggtttcaccatgttagccaagatggtctcgatctcctgacctcgtgatccacccgcctcggcctcccaaagtgctgggattacaggcgtgagccaccgcgcccggccaagttctcagaattttcttatgttcattgatgaatactaagtgttcttcagttcatcaaagttcacctaccttttaaatggaacatgttgctttgaaatgtggggaaaatgactattattccaaattgctctttcatgatctcagagtaccctatttatatttctactttttttttaaataaatactttaagttctagggtacatgtgcacaatgtgcaggtttgttacataggtatacattaggtatacatgtgccatgttggtttgctgaaaccattaactcatcatttacattaggtatttctactttttttttttttttaagtgaaagcaagtttattaagaaagtaaaggaataaaggaatggctactccatagacagaacctatatttctttctttctttttttctttttttttttttttgagatggagtctcactctgttgtccaggctggagtgcagtggcataatctcggctcattgcaatttccctctcctgggttcaagtgattctcctgcctcagcctcccgagtagctgggattacaggcacgtaccaccacgcctggctaacttttgtatttttggttgagctggagtttcgccaggttggccaggctggtcttgaactcctgacctcaggtgttctgcccagctcggcctcccaaagtgctgggattacaggcatgagccactgtgcccagccagaacccatatttctaaagaaagcatttagttcataaagtccagagattctttgaggtcaaaaagtcaggattgggagtccctgatgtttgcagtcagtgtggtagaacctcacagaagaaagaggagtttgtattttgttagttttatcaaagctacaacttttcggaagccttcagtccatccagcattccagggaactgattcctaagtcgggtgttaaggcactgaggtgtacaagttgtggccaaaactggagttcagctgaatgagaatgacacacttcccttttgcttctcctctgccttgggagcctttcaccacactggggagattagacaaaaaccttctgcagtttattttctttttgaacagttacattatggagagacttttaagctaaaagaagaaaagctccctttttgttacaaacagcagtgtgtagtttcaacttgtccaggacttcctcagagatgttttaagatccggtgtaaacttgctgtggtttgcctttgggcatcaaactgtttagcttggctctattatatctgtaattgctgcattttaataattgcccaatattcttgtcagcaatttgcagcctatatttttaatggaaccatttgcctttcttttccacaggtttgttcagacctggcttaagcccctggattaacgcagcacagaccctcagacccactgcagctgtgggcagggtgacgcaagctcattaaatattcccacaagcctcgtgccgcttacagtttatgtgcttcataaaatcctctgggaagtcatcttcttctgagatctccttacagggatttgctttataaaagttgtctttaacatttgctgaaatagcatattgtttcagagaggtttttccttatcaaaattattatataggcaggaggcactatagttcttgtgaaccaattcactaatttagggaatctaatatttcgaagggaaaaaaatagagacagatcctctttgtggtggttgaatttttaagttaacggagaagatttccatatgatcagagttgatgtggaattatggtgacagaaatgttcgacttagagggataataagtcagtttaatggctcccaaattatctctataatttagtcagcttttgagacaagaccgttgtgtcattgatgacttatgcctcaacttgactggtaattttgttcttttagtgagtccactctttagcttatctccttttgactgttgtaatgtttatttttcagtaaacaaaagattgaactggatttacagtagctaagaattacataaatagctatatcttaatttctccactttattggtataaatagctcaaagagaatggacaagtagtgatacagtacagtaattgtagctaacatttatttggttggttgttacgtgctagggactgttctaagcattgtgtatgtatattaactaactgaatcctcacaacagcctaccatacatttcctaccacaggatatgttcattcaagaagagtaagctgcctaacattaccatttggtaaggggcagagtggattcacacccaggcagatttttaatctttatcataatccgtatgctattcatactaggattttaatcactatcgtatatcaagattgaaccatagtggcctcctgcctatataataatttagtttcaagacatatctaagaaattctttttgaaattggaactttactgttattatttctggataggtaatacttgcacatggtattaatacaaaacccagaagggaattcagtgaaaagcttctgctccctcccacccctgtcctgcagtcaccctatttcccccgttctcataggtaaagttacaattgcaaagagccattttaaatatctctctttgtcacttgatgcaataaattaagaccatttaattaaaaactcatttaaaataattttttttgtactgttatctacaagcgcccacattggctttgtctctgaaggtagctatgggcaactcctgttgcgtgatatttcctgagtgaggatgacaaggccacaacccccaggtgtgtgagatggctcccggaaatgccaccattctgccttttccagggcttagatcagggagggtctttgcacttttacccataacttttattcttgatgagaaggaaccatgcctggagcatagtaaatgctcagtacatgtttgttaattgaacttctgtgagttgtgccaggctcagggatagagggctggagaaatatactttggagtgtctaaatcagtgaccattagggccgtgtgaggaatattcaagttaggcaaaccaccacaaaactctcattgaagactctggataggaaaaggttagaaagaaccttctagatccttgagtccagtaaccagatagtctcagatgggctgagagacagggaagacttttttcctgttaaaatgttggcaaacagttgaaataagaaccttgcctttttatgtttctttatttttttcagattgattcctagcacaacttaatttgatccttgtgataaccctgttattataacattagattgagtctctaatcagtgctggttttgttttcttgctggcactagggttgcatgtatcaagtgtcattgattactttggtaccacaacttaactggtggtgttatatttcaggtgcaccttgattttcttctgtagttctgaaaattctctataaaaccaaagatttaaaatgtcaaaaacagggccgggcgtggtggctcacgcctgtaatcccagcactttgggaggctgaggtgggcagatcacgaggtcaggagttcaagaccagcctggccaacatggtgaaaccccatctctactaaaaatacaaaaattagccaggcgtagtggcgcatgtctgtaatcccagctacttgggaggctgaggcaggagaatcgcttgaacccaggaggcggaggttgcagtgagccaagactgcgccactgtgctccagcttggcgacagagagagactctatctcaaaaaaaaaaaaaaaaaagccaataacaaatatgtcatttgcaaaagtatttgctataaaaatctttattagatagtcactgccctcagtctagtttgcttgagtgctattttgcatcttttaagataaatttcttacattacgcttttcagaaattctctgtttaattttagtgtctgtttgtttatgaagtttcttcattaagttttcttattgaaatttgttttacaggcagtttgaaaattgcaaggagggactttaagactacttctgatttgcaaagattgtctgtgctctgagcaggctaaagtgactggacgagacgcactgttggagaaataaaaatgacttcccattatgtgattgccatctttgccctgatgagcttctgtttagccactgcaggtaagttgcataatataaattgcatatttgttatatatttttggatatattttgtcccagtctctttagttgagatgaagtttcactctgttacccaggctggagtgcagaggcataatcatggcttactgtaggctctacctcctgggcttaagcgatcctcccacctcagcctcctaactagttgggactacaggcgtgtgccaccatgcccagctaatgttttattttttgtagagatagggtttcctatgttgctcaggctggtttcaaactcctgacctcaagtgatcctctcttcttggcctcctagcatgctggtattacaggtatgtgccactgtgcccgacctgtatttacatttttgtccctgaataaggatttcaagaaagcatttttgtcctttattagcaaataaatagatcttctagattgaggtgacactcttgacataggctgcttgggaggtatttagttttgcctatttcacatatttcaatatgtaacctttttttttttttttttttttttttttttgtggagacagagtcttgctctgtcacccaggctggagtgcaatggcctgatctcggctcactgcaacctcctcctcttgggttcaagcaattctcgtgcctcagcctcccaagtagctgggactgcagatgcctgccactacacgtggataatatttgtatttttaatagagacagggtttcaccattttggccatgctggtcttgaactcctgacctcaggtgatccgcctaccttggtctcccaaagtgctgggattactaactttttaaaaagtagagaaatacactgagcttcctggaggccaaatgagattggagatgaaaagatgcaaatgacttggaacattgttgcttaactaagagtatcggatctcccacaccaccatcttagtgtgtttactgtgaggggttacttagtaaatttggaagcttaatttgctctattttattataatttccattgtgtctattctgtaatgagctacataaaactaatttgttggaccagttctggaaactggcaggtctcagcaagaaaagcattgactcgaaaagtgattagctgcttggttttggctgttgaattgcacatacagatgagagtgatagtaatgatcatctattgagtgggcactatatccaggcactgggctaaacaattaaagaatataaaaatgaataaggatattcttatttaatgagctcacttaatcacaacttggaggtagaattaatttggcattttataaatgatgaaatgagatatggagagattaggtaacttgcgtagtgtcatgtagctggaaagtggaagagccagattttacattcagattttacatctatgctcttcacctctgtgttatactgaagaaaccagatctcccttaagactccaatagactcagatctggggttgtgtgcagacgtagactaagcgagagtcagctggcagaaactggtttatggattggaaagtagaatgttcctctcattgcaagtatctttttttttttttttttttgagatggagtctccctctgttgcccaggctggagtgcactggtgtgatctcggctcactgcaacctctgtctcctgggttcaagcgattctcctgcctcagccttccgagtagctgggactacaggcgtgtgccaccatgcctggctaattttttgtatttttagtagagacaaggtttcaccatgttagccaggctggtctcgatctcctggcctcagcctcccaaagtgctgggattacaggcgtgagccacttcccctggctataaatatcttgaaagaaagttgctaggccttttttgttgttgttgttttttgaatgccagtttatgaatttcaactgcccattctctatttttgtctatcagcagtttcattttgtctcattattgaagtgctatttgccttttagcctgtgtattaaaatggaattgacttaaaatctcatcgaaaagtagtagaaatgcacccccccacccccacctcccaaaaaaaaagagagagagaaagagggagagaagcggcttgatggaaaacatgctgttttgatgacaagatgtctagtctcaccttgtgggtttgaggctgggctttctgccttcattgatgcctgggtcagactgaaaaacacaactgaagaaggcactttatgggaaaggagtgagttcaatggccctgtccagccttgatgaatttgatagtgaatcagttttgcttcagatcttcctttcctatttgaagcctttgggaaaatatacacacaagtatatatatatttgagttgaatacacactcaaggctttgctgaggtggaagggacagtagagttacagattttttttttttttttgatacagagtctcgctctgtgtgtcacccaggctggagtgcagtggtgccatctcggctcactgcaacctctgcctcctggttcaagcgattctcctgcctcagcctcctgagtagctgggattacaggcatgcaccaccatatccagctaatttttgtatttttggtagagatggggttttgtcatgttggccaggctggtctcgaactcctgacctcaagtgatccacccccttcagcctctgaaaacgctgggattacaggtgtgagccaccaccgctggatgaattacagattttataatagcatgaggcaactgataaatagcacagaggtatggatgcctttttggtgtagaagtttgttggttgtttcccttttgcacaacataatagatcaaatgaatgaagaagagggaaattttgtttttttttttttttttttttgagacagagtctcactcgccccggctacagtgcagtggcacaatcttggctcattgtaacctccatctcctgggttcaagcaattctcctgcctcaacctcccgagtagatgggagtacaggcacacgctgccacgcccagctaattttttgtattttagtagagatggggtttcatcgtgttgcccaggctggtcgtgaactcctgagctcaggcaatccgcctgcctcggcctcccaaagtgctgggattacaggtgtgagccactgtgcctggctgcaaaaaaaattttttatatgctaatatctgatatttttctctgtaggcccagcatactttacaaaatggttttttgggcgttctggatgagctgaatttagctcatctgggtagttataacaatgatgaatatttcaaataattactgtgtgtcaggccccaaatttctttacatgtattatctcatttcatcctcataaatactctaagaaatatagatactttaataatccatagtttataagtgaggaaatggaagcacagagaggtcaaataactttcttaaggtcacacagctaataaatggcaggtggaactataaacctacttagtccaggtctggagattgagcctttaggcctctctactatattgatttgaaggaaatcatttgtttggaaagaatggtaataggttttgagccatttatgtcctcctgaaacattaaatcatttattcactgatccctgctgagtacaaagcacagtagtagtcacttagggatatacatgcaaagaaatgtaagattcgttcccaccctattttttttatttttggagagatgggatcttgctgtgttgtccaggttgaccttgaactcttgacctcaagtgatcctcccacctcagcctctcaaagcactgggattaaaggcgtgagccactgtgcccagccatattcatcccttcttttgagttgcttgtactttatttaggcttataaaatataaccatataaccaaataatgaatgtgtagtgaaagccaagtaaaacccaaagacctcagaggggtcacgaggggaagccctgtgggtcagagtagccagggacagctatgtggaagctctagatcttgaactctgtcttgaagactgggcagaatctaggaagaaggaggcactgagttcaccaggtgggaaaacctggcctagcacggaatgtggcatttaggtgcttaatttttttttttttttaaataaatggatgacctggagagctggtgtggaaatgtagcaggaggtctatttggaaagaaggatggagtagattatgaaagttcttaaatatcataatgaggcttgtggattttattctgtggtttggatgctctcttcttccatcccttggagccaaaggcatgcactgtttaatcttggaattcaaacggtggcctcaaacagtgaggctgagtatgtggcctcattagcttcagacccagcagtgcttggctcacaggctgtcatttatcaagggcttgatctctgccagctaatttatttaagacaactctatgagatgggtattattattatcatcacctccattttacaaacaaggaaattgagactcagtttggttaataatttgtacaaagtcctggaactaataagtggcagagttgagacttgaacctggcagtttggctctagaatccagcccatcaaccactagatccttctctagggaggagaccctgtgtgtgggatgaataaacctcttcttgattgattaaataccaggtgagtagctaccagtgtgacatcctggaaccagattaagcccctttggcctcagaagagacagacacaggtcatcagagcagaaggaccctcaagtagtgggccttctttattcatattctgacttaaccaaagtggccttaaagctgtaaatcggtgggaaggtgtggaggtctggcagcagaggggtgaaggttgtcaaaggcctccttttggttatgtggccagaggaggggcagagcacaagggagcacgtaaattgagcccaagttagaataataggagcctgcttgttccagctccataggtttgtctgggccttcagtgaaaacctttctttccttctctgcttgtgatagagagtgaatgaaggcagtcggggccgggtgggtcgggggatatccatgtcccagtgttagtgttgttctgacaaaactcatgctttcggctgggcgtggtggctcacgcctgtaatcccagcactttgggaggccgaggcgggcagattacgaggtcaggagattgagaccatcctggctaacacggtgaaaccccgtctctactaaaagtacaaaaacaaaattagccacgcgcggtggcggacgcctgtagtcccagctactggggaggctgaggcagaagaatggtgtgaacccgggaggcggagcttgcagtgagctgagatcgcgccactgcactccagcctgggcgacagagccaaactccgtctcaaaaaacaaaaaactcatgctttccctcccctccctcgttccttcgttatcatatagcactgttgaggatggagggtggactgtgctcttggtgaacacgagctgtgtaaggaccataatgcctcttgattagaaattagcttaggtgatttacttgggttaaaaaaaaaagagagagaataaatacaagagatttattggggttaaaaacaaaaaagaaaaaaaaagaaattatctaaggttatttattggcctcttagatcctgtaagctacctaatgtaagaaaagtgggaagtttaaaaaataagtgcttgatactatgggcttaagtctaagttttgctttaaaaactcgtctatacttgtgttataacattactattattgaaaatatctgctttccaggctgaagtgattcatttattattctagttctgctttcctcctttgtaatttgtgataattgtgcttttctttttaatacaaaaaatggataaaaataaaaacttgaaaaggcaaaaacaaaaacaaaaacaaaacaacctcccaactgttctacacatctttaaaagatattagctgctgcctctgaggcttgccaacattaggcagggctatgtttccaggagttttagtaataagaaaaagaggcatgcatggagaattcagggaaatcagttttattggaagggctggagttatcactggccccttgtgccaggtgagaggggtgccgctgaggtgagctctggagcagggctgctggcattgatgccagtgggctcttggtggaatggctaacttcttcattccactgtctcaattcagtacccagatgtatccttttggaaactcgcctgcaaactgtgcacagatttctattgagaaacacatttcttttcctctctactggatgtacctggaattccaggtagagtccacaggaaaatcgagatgcttttagtctgagctattttcctgctcagaaagctctgaactctttgtgtctgtgggagagcaagctgagataccagctggttaatacttggtctggaatggtacaagctggcagccttgagtagaggctaataataccatattgtatttgtaatcttaaaaatgtttttataacaggtatttcatttgatcctcacagcagcctctgggggtaggcaggcactattttcttcatttctagaatgagaataatagggcttagagaaagtaagtgatttagaaagataattcaagtcttggttggaccagaacttagacatgcttttgcagacaaactgcaccaacaaatcctgtgacctttttggtatagtgcacccttagcacctcttgacaaataaaaattgtatatatttatggtgtacatcatgatgtttttatacatgtctacattgtggtgagtaaatcaagctttttaacatatgcataacctcacacacttatcattttttgtggtgagaacacttaaaatatactctcttaacaattttcatgtgtaaaatatattattttttttcacatttttatagggggctgtaggaagggggcctcctcactgtcgagtgaggtggtcacagtttctttggcagctccaagctgggcactgggggtcctggaggtggctctgtatgtcagcatgttcctaccaccttggaagggcactagatagtttcagggcgtcacctggttggtcatgatgttgtacttggtaggggctgagtattggcccccatggtgaaggacatgactggcaccagctccatggcccaggcatttttgaggaaggcatgagtcctagaggggtaggtgagtgggggtcacctctacaggggtcatggccatcttaggctcagtggtggcagtggctactataataccttgttattaactatagtcaccatggtgtacagtcaatctcttgaacttattcctcctgtctaattgaaattttgtatatttgaccaacatctcctcagtccttccacccccactccccagcctctggtaaccaccattttactgtttctatgagtttgactttttttttgggagggggtgggatggagtctcactgtgtcacccaggctggagtgcagtagcatgatctcagctcactgcaacctccgcctcccgggttcgagtgattctcctgccttggcctcctgactgggactacaggcatgcgccgccacacctggccaatttttgttatttttagtagagatggggtttcaccatattggccacgctggtctcgaactcctgaccttgtgatctgcccgccttggcctccaaaagttctgggattacaggcctgagccaccgctcccggccatgagtttggctttttaagattccgcatataagtttgatcatatatgatatttgtcgctctgtgcctggcttatttctctgagcataatgtcctccatgttcatctgtgttgttgcaaatgacaggatttccttcttttttaaggctgtatagtattccactgtgtatatataccacattttcattattcaatttattcatttatcctgtacttgaaagagaaatcttggatgtgagttaacggcctgtgaacctcagaggtggttctgccatagttatctcctgtctgccaaacgagtgatcaaaggctgtaatactcataagggcaggaaggctggagggtgctggcaggggactaccaccagggaatgtaaggatagaagatggataggctcaaaggttcaaagcaaactgaaaaaaagccccctcccctttttttcttcttcttcttttttttttttttttttttttgccaaccctcaggtcttagaacacagctagttgatttggtctgtgattattattgtttttagctgattattttatcttatttttattttatttgtttttttgagacagggtctcactctgttgcctgggctggagtgcagtggcgcgatcatggctcactgcagcctcgacctcccaggttcaagccattttccccccacagacccccaagtagctgggactacgggtgcacgccactatgcctggctaatttttgtgtttttttctgtagagatggggttccgccatgttgcccaggctggtttggaactcttgagctcaagtggtccacccatatcggcctcccaaagtgctaggattataggtgtgagccatcatgcctggcctttagctggttattttaaccagttttgtgtttaattctgctttttgatacacaaggaaaggatattgtcaaatgtgataccagttatcaccagagtgccaaactttattttaaagagcaaataactgctattaaaagacctagagtggcatggtggtggctgcctgtaatcccagctactcgagaggctgaggcaggagaaccacttgaacctgggaggcggaggttgcggtgagccgagatggcgccactgcactccagcctgggcaacaagagcgaaactaggtctcaaaaataaaagaaagacccagagtggatagggtagcctgcattttagagtgtattccctttgaggatattgtgcacagccaagtgtgatgaagcacctccccacctaccttctccattagatttttctacagaaacagcatgtgcgtgcatgcgtgtgcaaacacaacacacacatgcatgcgcacacacacacatacacacacacgggagttgaggcagtagttgagagaaaggtgagttcatttctcaaagattcccttgccctgtatggacctgtgtgtgtgtggaggtggggtggatagcctaatgcaaggccttttactttttttttttccctgagacagggtctcactctgttgcccaggctggagtgcagtggcacggtagctcactgcagccttggcctcctgggctcaaacgatcctcccacctcagcctcttgagtagctggaactacaggcacatgccaccacacctggctaagttttgtattttttgtagagacaaggtttcgccatgttttccaagctggtctcaaactcttgagctaagcaatccacctgccttggcctcccaaagtgctaggattacaggcgtgagccactgtacctggccctttttatcattttcaaggagagtttactaatagctagttgggcaactgaatgtgcatatagtggaggggaggatgtttaccaagaatgagtaagattattgctagatgtgatgttagccaagtcaagagaatcgaggtttctctttgctttgcatccttatcgtaggctgtataattgccacccagctttctggatttctgattgatttgggttattttaggacagcagtgatggtgtgttttacagtgatcaacacttccatcaagacacagctttatctgtatgtgcctacacagctctttaattgctaaaagcttacccttgcacacggttgtgtatataggaaattagactttctcagcttgtttgctttggtaattaatccaactctggaggtatctttatcaccccatagagcttcgagctctgagcacgctgattttggaagtgatgtaggagcagggagtgttctgggaagtgttccgggaagcgtgccagcaagaggccttcctttaggactgaccctgctcagcaccgaggcgcatgattggcccatcccgcaccacatccatggcagccactgactttcattttctttaaaacgatctctgccagaatggcctaaaaaacatttatcctgaacttcaatctagtcatatttttgttttctgagagggcactgtcaatcaggtggaattctagagggctgaaaaatgccatagctcttggaacgttccttccaaggagtaggcagcaggtgctctggggactgaagcccagctattcccctgccctcccttgccagctcttaaacatctttaaaaaaatctacagtgtaatgtggaaaattttactaccttcaaagggaaatgttgatttaaaaaattattttaaagttactctgtttgttggcaatgaggggaaccatatatggcaaaaggaaaaggtcttgataaaattgctctgtgttctttgttttgcttccttttgtcctcatatgcctgagtaactgcgtcctagtccagaagattgaccagggccatctgagtaacacctcccttccttcctactctcctactccacccatgaggatacacaggtagcataggcctcaaaggagggcagaggttcagcctctggagtcagcccctgctctgcattttttttttttttttttttttttttgagacagggtcttgctctgtcacccaggctggagtgcagtagtgcagtcttggctcactgcagcctcaacctcccaggctcaagagatcttcctgcctcagcctcctatgtaggtgggactacaggcacgtggcaccacacctggctaattttgtgatcttttatagagatgacatctcactgtgttgcctaggctggtctcaaacttctggcctcaagtgatctgcccaccttagcctcccaaagtgccaggattacaggcgtgagccaccacgcctggcctccctgctgtgttgttttcatcattgaccccgctggactgctacagcattttcctgtgatgaacttttccagtgggatgcacctgtgcatgacaattatgttgttaaattgctgaaagttaaagttataatactacatggtgaagcaaaatgctctatagctcctgcccgcccttatcttttccttttgagttaattagaggacagaaccacttattttgccttttctttatacttttaaataactactatgttttagatgaagacttgtagtctggtcaacgttaagtacctcctaagattcaggtactttgctagcttctgaggcacagaaaggggagagactttggggttagtgcaaataatgagttttttcatttttttctttttctttctttttttttttttttttttttttgagatggagtcttgctctgttgcccaggctggagtgcagtgacgcgatctcagctcactgcaagctctgcctcccaggttcatgcattctcctgcctcagcctcccgagtagctgggactacaggcacccgccaccatgcccggctaattttttgtatttttagcagagacggggtttcaccgtgttagccaggatggtctcaatctcctgacctcgtgatcggcccgcctcggcctcccaaagtgctgggattacaggcgtgagccacctcgctggccttttcatttttttctaatacagttaactttcctaaagtgttgattgattgatttaacaaggatttactgagtacctattgtatttcagacactattccaagtgttggagagatagtagtaaacaaaacagataaaaatccttgtccttatgaagcatgtctctagtggagagagaccagaaacaaacaaaatgcatatatcagcaggttcgtcgaataaaaagcaaagaggttggggattgttagcggggattgcaatttgaagtaaggtgattaggaagggcttcactaggaacattgagcaaaggtttggaggaggtgagctaagtggatatctggggaaagagcattccaggcagcaggaaaagcaagtgcagaggccctgtggtggaagtttgcttgcagtgctcaggcaatagcaggtgggccaggtgcctgctggaatgggaagtcagagagttaactgaggggtgggagacggtgcgggtgtgtatagcccaaggcattgcaggccatcataaggttctcactctgaatgacactgagccattggagagtttgagcagaagaatgatatgatctgaaggatgtcttaacaggaccactctggctgctgggctgagaataggctgttgggcaaaggtggatttggagatactggcaagagataatgatgaccaggactccttattagaaggaaggacccttgggagtcatatgcttaggaaattcagaatgatgcttttgtaatttttccccaacctattccttttgaggaggaaagtggataaagatgtatttctcacatcagtggaatactgtgccatagcctaatattaaagataattacatctatagaactgaaaaagctgagtcttaaaacacaaaacaacctccccaaaccatctaaagaaaatctctttgtgttgtgaatgaatgtccttgaaaaatcatcgtcttaatagcctaaaccctcttttccttgcttacttaccctcctgatttccaagtcttgttcttttcatttctcagggggcctggttttcaggatcatgagttttgagggtcttaccaccttttgcagaagtgcttcttacagtgttgtaaattacagtttcgaagaaatacagttgcatccagttttacatagtaaatgtttctgagttgtaggtcaacctatttttataagttaaactacatattaaatgtgagcaaggagcatgatacagcagatttttttctataaagaaaataatcacttttaaatatattttataataaggatattcatagtggttttgccagaggtgagtggttttgccagaggtggaatataccatcttgtttatggaataggaagttttgcttttggagtttgaggttataaacaaatattaggccagtgctttcttatatgcatgagaatcacccagggatcttgttaaaatgcagattctgttttagtaggccttgatgggtcaaagactgtagatttttaacaggctcataagatgctgataccgttagtctgaggaccacatttgacagcataggtcatctgttttctcaatgcacaaattgtaacacagaaactgcaaacacctagacaatttcttagtgccataaaagggagcttgattttagcatgcctttacaacagctaccttgaacacctttggtaaacttgtttgggtcagagggatccatgtgctggagaggaaattggtttgaggcagtgagttccacagatgcctttagctctctgactgtaagtgtggtgcacctgcagaaaccaggtgcatctttattagctggggctacaccttgacataatcctaacagttgttaaagaaggaattcttcccgcccccaccatttcttccttttatgtgcctcttttgccttgtctcatttcttgccttgtgacttagtagaccaaggtaggagattcgtgttgggtcactgagggcggggtcattggtcccggaacctgtggccaagggactcttcggtaatgagaggtgatatgggctgagtggataaaagggggactttaggtgggttagcgagggtggctctggagttagggactaaaagttaaaagttgggtatacctcatttctgctagcagggctctaattttctagctcaggtttccccattgacttcctactttattctttttttttttttttttttgagatggagttttgctcttgttgcccaggctggagtgcaatggcgtgatctcggctcactgcaacctccgcctactgggttcaagcgattctcctgcctcagcctcccgagtagctgggattacaggcatgcactaccacgcctggctaattttgtatttttagtaggaatggggtttctccatgttgctcaggctggtctcgaactcccaacctcaggtgatctgcctgcctcatcctcccaaagtgctgggattacaggcatgagccaccgcgcccggccctactttattcttataatcacactccagtctagagcttttaaaaaattaacattttttagaagggaaaaatttctgtaagttgtaattgatgtttattaagcaccctgacaccacatttattataagtggggataagactgagaatatttaagctctgtgcctgaaaagttgtgttttaaactaacttttatttgtttacactgccattgagtagtttataaggttttctgatttgctttctctggcctcatcactgtttttggagaggcagcgtacaacctatgtacagctctggagctcgccgcaagactcaggtggtggtcattctgcttttgaaattgaaccagaaaagtcctgaggaatgtaacaatattttttctttttgcccccctgctagcttttttctagccctcccaaaaatgtgtttatgttgctgtccatgcatgtggagcagtctggaattctgtgtgacattagatagtgaaaaaaatagatttcccacgtgactgaggttataggagtgagaaatcttggattatgcaaggactctttgattggaagaaggacattttgagatgagatttattttaagatatagtaaaaaaaaacctagtatacaactttttgtttttttctaaactaacccttttcgggggtgacaggatggggtgtggactagaagcaataccaaacttttaagtatcaaatcttcactcagaagaaaaaaaatgtcttcagggtgaaagaatagctcaaatgcgaaaagcctgatagttatataatttgagagtagggtctggcatattatagaggactccgagagcctgatccaagcagcctgccattttcatcaccccaggattatctgtaaggacaactttactgtctgtcacctgccaggtctcagcctggcccttgtgagtgccaggaagtttgtgtcctctgttttgccaagcttaattagctctagaaataccctatcaaaggctgtctggcagtgttccattaatggtatggggtgaattcaaaagcactaattaattgttagattatttgcaaagcccatgctgaaaaacctaatgcctgcaggagaaagttggcagagagacggtacagagattagcttggaccttacccggctcaattgcgttttggaattgggccaagaggggagttgcttttctttttggagaagtgcttgtggctatattgttttctaaactgccagtgtactgctctaggctctccgtgagggagctcatatggacacttgcagacctagagagcccagagaccatcttcaagaggttttgtttatttttgttttgtgagagaaacacaattgtttaactttcattaactaaataaattcttcgcaagggcctcttcttaaatagaggaaaaggaactctagtttgtagtgtaacaattcaggttttaagtgttaaatgttcaaaggagccaggatcagggctttaaatagttttttcttcttaaaataaaacaagtcaggttcctcatgtcctctgtttaggtggcccaggtcagcaaaaagtgaattttccaactgctactgcagttggaagatgctgtttaaaaaaatcttcatttgaaatcaagtgcatgccaatttaaggtcagggtatactacatgcaggaaaggaagaaacaggtaaacaggtttgcattattttgctacatttgacatatagaatgataacacctataattaactcagcttgacaaattgtagacaaataatagaagtccctgtcccttatagatgagagagatttgaggcttttggagccaagtgccagtttctgttgactctgaaggcaacggagacagctgaagatcaaagtatagaaggatatttcagacttatctaaaagccaattgagtgttatataagggagctgtgtgtagctctgtttgaaaacatccatccagtaatcttccagttcctgagcctggccctgcctcctgttgacaggcctcagcgtctttttcttgtccttttgggcttgagcaacatgtgagtaagtacttatgtacaaatcccagaccaaatcttactttattaacatgattcagaagaaaagaattctaatgaaaaatttcagaggactgtgccgaaacatttcgtgatgttgtcagatctccctgaactcaggaaaggcccccaaaaatctattatttctgtttattactcaacttggaaaaagcttacaagaatgcctcaggagagtatgcactggttgaggaatttattcctgggtgtacagcatcccctacgtttactctgtgtgaggcgggctatcctgaaaccctgggcaacctgcctgctcctcagccagcaggtctagagtagcagcttagtatttttaaccctttctgtcatatgactcccagccaactttttgagttgatagaaacacagatctgagagctatgaggaattatgaaagcctttgtactgacaaaagactatgatttttctttgctgctttattatggttaaaaggtctcattatgcttttattttggagaggtaattctgtataacaagacctacttgtatatcccagttaggttgtgagatatcatgaataacattacaactgatagttaaattgaagactttaaatgattttcctcaaaaagataaaactaaattcaaggttattctaaaataagtatggttatttgcatttaaaaatatttcaaagggagaaagagaagttaggattacaagtgatagaatgaaaagtgctcataatttgttgcctgtagtatctgttttgctattcatgaacatggtacacccattcatttgtttaggttttccttaatttctttcagcactgcttttgtagttttcactagtttcttttgaagactctagtgtgtccaaatgtgaacaagattcatcatgtctgtcttattagaattatgtttaagaacctctgttttagagctgtaatgctatcctcttcaatctactcttcattaataatgatgaaaactgatactccctctgactttcctggagagtgagctcaggggtgtgtaactaaggctattgctaaagtgagttatcggcctggctgcctttgctctaagttgtaggaactcaaagctcagtgtgtactgtgagatatgttctttaaggctgaaggctagtgttgctgagcaagagatgtagtaaaatgaatatccttgttcctttggactaaatgtcagagttagaggcagtcttggaacccaaagattggatgttgtgcctttccatcaggccgttgggctttcccagcagagtttcgctggaacagagtcactccagtgaactttcattttggacttgtaacaaaaggattttgtagagattttaccctctgaatgtgggtaatacctgagggctttatcaagatgaagagtaactttgttgggttgctgcacctttatttagggaaagtaattctccaccacagtgtcaagagtggtcttgacagagacatatgaaaggtcagagagtcaggatcgtgcactagttgtgaccttgggttttggattcaggcacacaggttcaggtccagatcataggctgtgtgaccacaggctcagtgtcctcatttgtaaaattgaagtatcagtagttcctgtctcagttgtgttcttgtgaggattataaatgagataatgcatataaaccagaggatcacgtttattatgaatgaaactactggaaatagtattctttgaaaatgttaccatagtacttacctagtttggactgctataacaaagtcacatataagtcacacatagattgtatgtcttataaacaacagaaatgtatttttctcacagtgctggaggctgtaagtctgtgatcaagatgccagcatggttaggttctggaaagggccttttccaaattgcagactgatgacttttcattgtatcctcacatggatacagtcctcaaaaagacaaactagagagttctctggagtctcttttaagacactcataccattcatgagagcgctgtcctcatgacctaattgctccacctgttagcgtgccccatctcccaataccatcacactggggttaggattttaacatacaaattttaggggggtacacattcagtccgtaacacatggtggacatatttaatcagtcttttaagttgcagttctattattcaggcatatttttggtacaaaaattagatctgatcctgaaatataatgttgctgttaaacagactttattgatgcccagtttctttattttccgtaagttttacttagagcagtacagtggaaataccacagtggtacaatgggagtgatggagttgggagagggtgtggataagaagtgctctccctgccccccaactttttgttttgttttgttttggagatttgagtcccagttttgtggtttgcagagcttttgttgccttatctatacaatactgctaattatacctattcctttgatttgatgaggataaaatacttgtaaagcagccagaagtttatggcacatagtagttaggtcttcaaaaagttaatctttatttagacaatatatatgtgtaggaaaagagggggagagagagctagaacaaccttatgatgggcagaatgcatttgctgtttagctttgtgctcccaatggagaaaaagcaggttggggaatgtccttgggagatggctgaggagctgttggctgagccaggtggatttgaactgagcacctggatggaaaagaccttgttttcttttgaggcagtgacttggtctttaactggaagttacagggtaaagatgaatgctcaagaacggtggcggtgctgaggatcaggaccagtgggggacaggagaacccaagtgaagtggattgaggctgtgtattggtagttttcctcatctatatggtacctctaggctcagtcccagtctaaccaccctacttaaaattgtaatccctctctaaccacagaaactcctattccttcttatcttgctctgtttttcctcgtagcacttctcacctcaaaagctgcttgtaatttacttatgtttattatttatcttcccccactaaaatgtaagctccgtgagagtcaagttagttttgcttttgctctggtgcagctttttcttttttcttttctttctttctttctttttttttttggcagagtcttgctctgtcacccaggctggagtgcaggggcacatttcttggctgactgcaaccttcggctcccagtctcaagtgatcctcttaccttagcctctcaagtagctggggccacaggtgcacaccaccatgcttggctaattttttgtattttttggtagagacggggttttgctctgttgcccaggctggtctcgaactcctgaactcaagcaatccacctgcctcccaaagtgttgtgattacaggtgtgagccactccacccggcctaaaactactttttttttttttttttttgagatggagtcttgctctgttgcccaggctggagtgcagtggcgtgatctcagctcacagcaaccttcgcctcccaggttcaagtgattctcctgcctcaacctcctgagtagctgggattacaggcccacaccaccactcctggctaattttttgtatttttagcagagatggggtttcaccatgttggtcaggctggtcttgaactcctgacctcgtgatctgcccgccttggcctcccaaagtgctgggattacaggtgtaagccactgcgcctggccaactatttttacaataattccaagattgggttaacactgctctaattgtataagagcaatattggataaaactgctggtgactcagcaggaatgaaggcagtacttcactggcacacacttgcagtaaaacatctgccactttcctttaagagtgttgttaccctcagatacatgttttttccttattctatatggtaaaatgggaggtacgtatgttgcatttctgcattccaaagtacaatgattttcttgaggaaaagcactgtgcagttgtttgagttgtgagctgatctggtctgtttttcatggaacaccatttgatgtgaaagagtgactgacagacaactgatggttatccagacttcagtatttggcagacatttttgaaaatgaacaaagtgagccgggcgcgggggctcacacctgtaatcccagcactttgggaggccaaggtgggccgatcacctgaggtccggagttcaagaccagcctggccaacatggtgaaacccagtctctactaaaaatacaaaaattagctgggtgtggtggcatgcacctgtagtctcagctactcaggaggctgaggcaggagaattgcttgaaccctggaggtggaggttgcagtgaactgagatggtgccattgcactccagcctgggcaacaagagtgaaactccatttcaaaaaaaaaaagaaaatgaacaaagtgaacctgttagttcaaggaaaacaacagtatttgttgccaataataaaatttcgtttttcacacaagttaaaattttggaaaacttacatccattaccatgattatgacagtttctcaatggttaaatacttttctgatgaaatcagttgagatattaacaaatgtgatttttaaaatattatataatgaaatatgtcttatttggcagtaaaccattattttccagatgaccaatgcatgatattacaaaatcatgcatgatattacaaaatcatgcatgatattacaaaatcatgcatgatattacaaaatcatgcatgatattacaaaatcatgcatgatattacaaaatcatgcatgatattacaaaatcatgcatgatattacaaaatcatgcatgatattacaaaatcatgcattggtaaaatattccacatcttgagagtacaagatagaacaattgattttttttttttttttgacagagtcttgctctgttgcccaggctggaatgcagtggcatggtctcggctcactgcaaactctgcctcccaggctcaagtgattctcctgcctcaggctcccaggaagctgggacttcaggtgcacgccaccatacccagttaatttttgtatttttttttttttttaaagtagagatgggatttcatcatgttggccaggctggtctggaactcttgacctcaggtgatccacctgcctgagcctcccaaagtgctgggattacaggcgtgagccaccgtgcctggccagagcaagtgatttttaaaaactttttattttgagataatttttgactgacagaagggttgcataagtagtacagcgtttctttaggcttatcactcagctttaccttatgaggacatcttacataaccaaagtacaatgatcaaaactaagaaattaatcttgttacaatattattaactaaagtataatatttattaggatttcaccagtttttctactaatgttctttttctggtccagaatccaacccaggatctcacattgcatttagtcgccttgtctccttagcctcctccaggctgacagttccctggtctttcaatgaccttgacgctttgggaactactggagaatgtccctcaattaatttttttcctgacattctctcaggattacattgaggttatgtgtcatttggaagaataccatagaggtgatgtcctcttttcagggcatcaaatcgaggatatgttatgttgataggaattattactagtgacgttaatcttggtcacttggctagagtgatgtctgccagaattctctggtgtaaaggtactatttttcactttgaaattacgcagtattttggggaaagcaaaggattttaatgttacggagtatgaaaaatttattatgtaattcagatgctaccttgcaactaaacttaagaaatgattatttgttgagtttaggtgtaatagtaaagaagaaataaccacaagtatataaaaagacttaagatttggctgggtgtggtggctcacacttgtaaattccagtactttcacggggtgaggtgggaagattgtttgagcccaggagtttgagaccaggctggtcaacacagcgagaccgtgtctctacgaaaaactaaaacattagccaggaatggtggtgtgtgcctgtggtcccagctgctcaggaggctgaggtgagaggatctcttgagcccggaaggtcaggactgcagtgagccatgttcatgccactgcactctagcctgggtgacagagtgagaccctgtctcaaaaacaaacaaacaaacataaaaaaacttaagatttgaaacttccaactgcatatactgtatctgtgtgaggccagatttcttcatatccttcaaccagaacaatgtattgcaaaaaattgaatgcaaaagtagatgggaaaacccagtggtcttgtattaagccagacatttaaagagatttgctgtgcatgtgtctttgaaatttaacaagaaaagagatttgcggccgggcgcggtggctcacgcctgtaatcccagcactttgggaggcagaggcgggtggatcatgaggtcaggagatcaagaccatcctggctaacgcggtgaaaccctgtctctactaaaaaatacaaaaaaaaaaaaaaaattagtcgggcgtgatgacgggtgcctgtagtcccagctacttgggaggctgaggcaggagaatggtgtgaacccgggaggcagagcttgcagtgcgccgagttcgccccactgcactccagcctgggcgacagggcgagactccgtctcaaaaaaaaaaaaaaaaaagagatttccaaaaatgtaaaacagtgctgctcatctcaccttacattttgttttagaaagtagttgtttttcatgaaagatactgtttatgttacagtttattatagttggtttttagtgaattaataaatatttaaaaatttcctcagttttaatttctattgcagaaaatgttaatagacttatattaacaaaatctctttggagtcctcagtaattttaaagcaataaagggatcctaacaacaaaaagtttcagaattgctttttttctgaataatacagaagagatatcttagtaggggaatcttttcttctggaccaaataaagatttaatgaaggactccaccaaggactcttggtccttgcagggaagtcactcaattatcagtgtactcagctggcagatgagggggattgccttgtactatctccaagtttctttaaaccccaaactacatgatttcaaatcactatcattgtcagcatgggcattatgcagcaatctcccgagtatgctatttgctaggttaaagatgaaggttatatgtaaggatataatgcagtagtatttgtgaagcagggactccagggacttttctttttgggcctgtaaaattatttctttcactgctcctttaaaagaatagaagttttcatgattattagattttactgtaatgagcaagggaaagatttttaattattgctgaaaatttttgtcaatttatgtatatcacaaatttaaaaatgcatgatttctgagaatttttctgctctaatgtatatgtgtaaacttatgtgaatatttgtaagtatttacataaatcatttaaatttgttaatgggttctaaatataccactgatgtctctgttgaagtagactcgggttgcatatccattatatccttacttaccagccgggcatggtggctcacacatgtaatcccagcactttgagaggctgaagtggatcatgaggtcaggagtttgagaccagcctggccaacatggtgaaaccccgtctctactgaaaatacaaaaattagccaggcgtgatggtgcatgcctgtaatcccagctacttgggaggctgaggcaggagaattgcttgaacccacgaggtggaggctgcagtgagccgagatcatgccactgcactccagcctgggcgacagacagagcaagactctatcttggaaaattaaataaataaataaataaataaataaataatatccttacttatagtcttcatgaagttaatttgttattttggttctttggttttaaaaaaaattattaggtctgtatttacaaatacagacttaaaaatgtaccagctagaatctattaagaatccccaactttggaactaacatttttcttttttagtttaaatgaaaggcaatttgatggcttagttttttaaaatggggaaacaaaagggaggggaagccagtagtatcttgttgtgttaagtatcagtttaaatcaaatgttaaacaggatcctgcattcttgtaaagtgaatttagtaatggaaactgccacagtggagggccagctctgtcataatcaccaacttgagcatctctgatatttagcagaaatataaatatctaatgcagcgtgtatgtgttatactgtcatggcaaaatgttgtaactgattttgagccagattcttccagtgttttgaagctactgcttggaaataagatttggaagctgaactaacttctacaatttggtaaactatagtaaagttaactcagcatatattataaatacaatagaaatatataattatatataaaaaagtttcatcaaatttcaaaggtttaagtactattttaggatattcatagaacccaatctaagaggaaaatgctcctcactgccagcaggagaacttaatggagcgcagcgttttagagcatagacgttaagagccagctgcctgggtgcatatcccacggctgccactgagtagctgtgtaacctcggtttgcttcagtgtactcctctgtaaaatggagataatatccatctccctgggttgttttgaagatctaacgagatactgtgtttcaagtgctctgttgttccattattgtttagttagcaattgttaagttttaggttatttcttcatgacatctgaattttttttaaaatttatttatttgtttattttccttgagatggagttttgctcttgttgcccaggctggagtgcaatggtgcaatctcggctcaccgcaacctctgcctcccaggttcaaacgattctccagcctcagcctcctgagtagctgggattacaggcatgcaccaccacgcctggctaattttgtatttttagtagagatagggtttctccaagttagtcaggctggtctcgaactcccgacctcaggtgatccgcccaccttggcctcccagagtgctgggattacgggcatgaaccacggccgacatctgaatttttatctcattaacaacatatatcctcaagtaatgttttagggtaagttacatctgggaagatttggtattcatagggcatggtagagttctagtggtatgttggctttttttttttttttttttttttttttgaggtggagtctcgctctgtcacccagactggagtacagtggcacaatctcggctcactgcaagctccgccttccgggttcacgtcattgtcctgcctcagcctccccagtagctgggactacaggcatccgccaccacgcccggctaattttttgtatttttagtagagacggggtttcaccgtgttagccaggatggtctcgatctcctgacctcatgatctgcccacctcagcctcccaaagtgctgggattagaggtgtgagcaccacgcctggcctgtgttggcattttaagaatccttggagattatctggtcaaactcagcctgatatgtaaactacctttctaatatcctgttgactaagcccccaacctttacttgaatttaaaacatccctgactcttgggaaattcttccttgtgttgtgctacagttcatctggctgtaacctcctctcccagcccttacttcttccttgtagagctacatagaatttttgtctaacaaataacccatctgaatggtgacagtgaagcaaatgaattctggacaatttaagtgttgtataaaagtggccggatggtgtgtgtcaaagttgagggagctcagaggactttgctccctgttggtaaaagaagcaaggctcagatttgtggttagagctatcctgatctagttgggaacacttttgcctcattgagcctatgatggggctgtgagccagacaggggataggcagtggctgggtctctgggccccccacttgcataaagcacccccatccattgctatacttgtcctttcctggaggaggagcttctttgtgccttaaaaattatctcaccgccaggcacagtgactcacacctgtaatcccagcactttgggaggctgaggcaggtggatcaccggaggtcaggagtttgagaccagcctggccaacatggcaaaaccctgactctactaaaaatgcaaaaaattagctgggtgtggtggcaggcgcctgtaatctcaactactagggaggctgaggcaggagaatggcttgaacccaggaggcggaggctgcagtgagccaagattgcgccattgcactgcagcctgggcaacagagcaagactctgtcttaaaaaccaaaccaaaccaaaacaaactccatctcacgtatttgttcattgtctatttctcctcctgcatagaatggaagctccatgaaagcagaggagaaactgcttatcttgttcgctgctgtttctcgagtagccacaagaacttggcactttaggtagtaggtgttcggtattcaaatgatggaattaaagatcaactctgaactctcaaaggcagatagattttcactttagtgcaggaaaataaacactcatatgtcatgcccattcttcaggcctgaaccaaaggggaacctgtcagaggataggaaatgagatctcagcagcgtctgttactatttgcaattttcaaatacataaagagaaaagtatcttttgtctttttgatatgtgaagattttctagaaaggagaggtttcaactcttattgaaggcgggagacaccatgctatcagaattggattttaaaatcagcccagctggatagtagcttcaaactgcagccagcatgatgtgttacatgagtttagctttgagtgttaaaagaacaagtttgccagaaacatgaattgttaaaaaaccatgaaaacattacaatgtaggaaaaaaatgtagtgaaaattccagtatataatgtccaaatagttcctttttctggaggctttaaacattttcttaggtaatttgcaaagaatattggacaatgtagaaaatatgtgtagagttaaaatgatattgagaattctgagcagatgattaaggaaatctggacctccttttttctttgtttctttctttctttaatatgttagtacttgagttttccatagaattaggacatatatttaggtcagatctcactgggatattccttgggatatcttgattcagggttttcttccttttttttttttgagatgaagtctcactctgtcacccaggctggactgcagtagcaccatcttggctcactgaaacctccgcctcctgggctcaagcaattctcctgcctcaaggcctcccaagtagctggaattacaggtgtgtgccaccgcacccagccaattttttttttaatttttatttttagtagatgtggggtttcaccatattggccaggctggtcttgaacccctgatctcaaatgatccacctgtctcagcctcccaaagtgctgggattataggcgtaagccaccgtgcctggcctttttttttttttttttttttttgagacagagctttgctctgtcgcccagggtggagtgcagtggtgtgatcttggctcactgcaacctccgcctcctgggttcaagtgattcttctgcctcagtctccctagtagctggtattacaggcgtgggttaccaggcctgttttttttttttttttttttttttgagtcggagtctcctactgtcgcctgggctggagtgcaatggagtgatctcggctcactgcaacctccgcctcctgggttcaagcgattcttctgcctcagccttccaagtagctgggattacaggctcccgccaccaagactggttaattttttgtatttttagtagagacggggtttcgctatgttggccaggtcagtctcaaactcctgaccctgtgatccacctgccttggcctcccaaagtgctgggattataggccactgcacctggcttttttttttttttgagacagattcttgctctgtggcccagggtggagtgtagtggtgtgatctgggctcactgcaacctccacctcccgggttcaagtgattctcctgcatcagtctcctgagtagctggaattacaggcatgtaccatttttatatttttatataatttttgtatttttaatagagacagggtttcgccatgttggccaggctggtcttgaactcctggcctcatgtgatccgcctgcctcggcctcccaaagtgctgggattacaggtgtgagccaccatgcgtgaccccgattcagagttttctctgagaagaaactcccttcgattttggaacccaggaggctggactgccttctagtctaggttctaccttccccctgctgtctggtttggcttaatcacttgattcaataattttatgactttgagtgagttacttaatatcactctaccttagttctttcatctgtaaagtgcggccaataatagtgtatctcaaggttgttgtgaggaataaacatgttaatacatgtcaaatgcttagaagagacccttgcacaatagtaaacactccatagataataatgttattattagccaaatgtggttattttgagggtcatataatggggaaaaaaatgcaaatttaaaattcctgtacaaattcaaaggaatatcgattgtctctgtatatcaaagatgaccttagtatttgcaaagctctctctcatttagggccactagctgtttttccatttacacttccctatacaggatatagagttaatttctaggaaattagccattaattattggttaatgatggactaggaatgctctcaggagagctgactagttagaacatgacataactttgaattatctaagctttacctttacgtggaattttaactttgttgaatttttaagtaaagggatataaaagccagtctgctctattattagattcactgtgttcataaggcaacatggaaaaaaatagataatacagaaagaaaaatgacaattttaaggagaaaagtttttgtttttaaataattttctatgttaattaaattccatggatgttttgttattactttgtctctacagagaatgcagcagattttgaacatgcttttttccctctgcttaaaatgtgttggctattatatttcacaggacttacgtcgttttcaaaaatagaggtaattaattgttacgtgttttgatgttcagcaggcaaaggaaacacattactttgtgtaaacagaggttaatatggagtctttgaagtctaaattattgaactatttgcctaaggacaaacttcttaactgtttaggtttcttctggcctgtaataaactacagtggtggaaataacacaaaaaatcctgtgtataaaacatttgggtcctggttgcgtgtttgacccaaatctgcaggtttacctttgagttacactgcgaattagggacctttcatttccattttcctttccttgtagtggtttagttggttcatggttgataaagacagaagcatatgtttctgggaatggtaaaccttaattttgcttaagttttaaatgatcacttatttctggaactggcactggggtcgaagaatgtttattattccatgttaacatgggaatgagtctaaagactaagtgacgtttatgctcacttctattttacagcttccttgggctctagccaaggtgacttggttttgcaagagcgaagaggacctgccttatagtgcagtttttttttttaaattgtttttgtctgaaatgatctaccttgaggacagaagctgtactttgcagagtaaaagacaaactattactggttttaacaaatgaacaacccaggcaggtgggcatggtgcaggttgtgccccagcttgtgaggtctagcagatcttgtggcctttggacaggcttgccttggggaggtggaaacacaatggtgatgatttctaacttgaagagacctttgggactccagtccagaagtttttacctgtgtgtactgggtgggaggcgtgttgtgcttcctgctatgggggtggtgagagccgtttcccacctaagtgggacagggagaaagcgtctgatcggcacacagggtgcagaagcagcactggcccaactccacactcacttttccaggatcattccttttgcaccaagctctgaccctgtgccctctcactgctctggggactgttgaagccacaaggaggaagttgctactccttatgcccttcattcttcctgtgccccagaccgagatctgtcaggggtggggtattggaccccacctgaaatcacttgtgtatctggcagctttcttgggagtttctcctcagggggcagactcccatataaagtactggctggtatgactgcagctcccgttgacccactcactgttcacagaagcctaggaacagactgtagaacccagagaaagctctgggtgacctctgttatttagcagctgcttgcagcaccagtcactgtggcaactgggctttgtttatgaaaatgaatgaggacctcaagcctggggcatccataccgtggacagagctccccctggaaatcgactgcctgccagattgccagggctaaaccaaaacaaagacataccaaacacaagtagccaggaagtattctgcccttggggacgagcaccaagtcccgattgcctgtatccctcttcaccaagcataaccctgccaggctgagctgatcttggttatgccagagaaagacagaggcaaagaacatggtactagtattggcagtttttggaacacagccttgtattgctcaggtctggcctctagttctggttttagatggaaagagtgttgagtaccaaagatctagctttttgaaaattttatttcaggccctgcctttatgtaaactgtaacgatcatttgggtctgtactcaagaggcaggagaatcacttgagcccaggagttctgggctgttgtagtgcactatgccaatcaggtgtctgcactaagttcagcgtcagtgtggtgacttccctggggactcccaggggactgccagattgcctaaggagagatgaactggccaggtcagaaatggagcaggtcgaaactcccatcctgatcagtagtgggattgtgcctatgaatagacactgtattccagcctgggcaatatagcaagatcctgtctctaaacaaaataaaacaaaacaaaaaaaaaccccttgtctggaacaactgagtttggagtttgttgtccccttagagtccttgctttcatagtgattgttttcttgtgtccaaagcatccttggtagttttaactctccatgggaattggtgagccatggacatcatcttggagcacactttgaatctcagagcttcctttgaggggactgctatgttctgggtgcttctggtattcacaggttctatgattctatggctggacccttctagcatatgtgccctttggtgtcactttgtcagaaccacagccagtgcatgggtcttctgatgccatcctgtggctctcttccccacaccatgccttgtttttttttttttgtttgtttgtttttttgaagaccttcgagtctcgctctgttgctcaggctagagtgcagtggggcaatctcagctcactgcaacctctgcctcctgggttcaagtgattcttgtgcctcagccttatgagtagctgggattacaggtgcgtgccaccacacctggctaatatttgtatttttagaagagacggggtttcaccatgctctccaggctggtcttgaactcctgacctcaagtgatctgcccacctcaccctcccacagtgctgggattacaggtgtgagccatcgtgcccagccacactgtgccttgttactgcatgtctgcttgggtcatggcccaggtgtcatggtggagggggcggggttgggaggtagagagtgctggcattggtgatttgccagcaggacacatgcccaggaagatggtcagaaaaagagggactccttcacgtacgtataagtcagctttagccttaaagcttcaaacacccactcactgcattgaggagtccttgaggtccctcacctgctcttcctggtctgactagatgccagggaattgggagagagggacctgcagtgggagggtcctggaactgcagtgacagtaatacgggcttaaactagaattccttcctggaagaatttcggtcttcctctaccccagcagcctttcactccttaactttagtagtgtgccttggggcttgagcagctgctgcttctgtggaggtgaccatccagagggaccctttcacagctaagttcacttgcacctccgtttctgcttaaggcaactacagtttcgggggtggctgcccctgtttgctcatgataattccttatgaactctcctgttgataaactgaactggatcagctttagtttccctttaactaaggatttaagtcaaagcgtaaccacaagtgtcctgttcgttttcattcatttcagtgctgaacatttatacactgggctatggatttgatgtttccttcctgtcttggctgagatacctgtgtgaaatatgagtttgccatttggcaaactctttttcctttgactagttaatgaagccaaaatattgacgggggtgtggagttaggggaagaggaggtgtgcatggttacatttgaaagttcttcatggtgcaggagaatccagtgcttcaccctgagtaattgtaattagggtagtaagtaaaccctttcaggtttattctatagcgatcatgacgagttatcttggggaagggataaagaagactgtgagaggttgtacagttctgatcctgtcaggctttgagaagcagacctcagcgtgatctgaagagccggtaccctggagtagatgattaaccaagataatgttccggacagtctgcagctgaactgaactggtgtctctgcatccattcatagttacccagtgtggttaataacaagtccgttgggagttatgcctgtgctggccataactaccttgtattctggatgggggtcagagaaactgaatggatcgattcattcactgagcagtgagtgactgcagccttactgaagccagctcctttccagctctttgatgacatgcactattattgttgttaacaggttggctaaaaaagtaaacctgggagagttgaggctttgttcctctgtccagcactcagatatttcctgtagtcattcagtaaacatttaccaagtgcttactgtgtgccagggactgtgttatcataaccagtaactttttcttcgttaatgaattatctcatgcggcgtgcatacaaagaagccttaagaagtggaggataatgggggcctgtctctccctgctcatcctttggggctgtcacatcacggaaaggaagtaacagtcaacttaaatcagtttactttggtaatagcagtttttgaaaaggtttggagcaggaaattgaaactcttgagaaacaggaggtttggggattactgctggatttttcttattcctgctatcccaaggacttgatcccagttaccactgataatggaccccttttatgtttaactgtcttgtcagtaagtcagtgacacatgctgagaatagaaaccagtaccattccatgtcgtaaccgccagcctgtacacgccccgctggttctgttgttgtgatcgttgctacagcgcttaacatcaaacgccagcctcatgcctggcactttacatcacacctacggcgtccccaccccgggagcttaccttccctagaagtccaggacattttctatgttggcaccacaggaataggtagagggcaagggacagaaagttttcgtcagtaaaatgtggtcttttcttgaatcaataaaggcaactatgttcatctgttttaataggaaaggcctgtaggtaattttttttctccgttaaaatctgcttttaaaaatgtttggggttgagtgtaacaacagattgataactctctgttcatcgcttttccgttcttgcaaaatatgtgacttgcagtggttgactaagtgctaggctctgacgggaagaaatgagacccgtggaactcctggccccctgctctgtaggtgcctccagaccagggaggggagacaggcatcaggtggcatggccaggccttttttttttttttttaatagtggatgggagaaaatgggaatatgactaattttatttaatacttaggttgttttgtctgtttgctttactggcatagggtcatcttcagctgaagaaggatgtgctggtgcttaggaatggctgtcaggagccatcggtttgctccttcaaacaggaagggcaatgctggcttcagctaagagcgagagagcttctttccccagacacccagtatgtctctctttgcaatcattggctgaattgactcagcttttcctcccatccttgaatcagtccctggtagagtaatggagttacagtgattggcttaggacagtcagctggagaatcagtcacaccactcaccacagcggcctcctactaaatataaatgtgagcgggacttaaaatagaagaaatgcacatctaacaggaccataacttagggataaggtactggacaaggtaatgaagaggcgatcatggcccttgtttgtgtttcctccgttccctcggcagccttctaggggaccctctaatgtgctacctcactgtgtacctgtctctctatcctgactccacctgtcactctctctcgactctgggagtatagctgcttaaggccaaggcactctgtcttactatttgtggccactgtagctggcacatagcagggacttaatatgggtttcagcaaattgaacgaaaaaggatacttcgtattcctttgtgtttaacttttatcaaacattgcttgaatcaagtggattttttttttttttgagacggggtctcactctcacccaggctagagtgcaatggcactatctgggctcactgcaacctctgcctcctgggttcaagggattgttctgcctcagcctcccgaagagctgggactgcaggcacccaccaccacgcctggctaatttttgtatttctagtagagatggggtttcaccatgttggccaggctggtttcaaactcctgacctcaggtgatccacccgccttggcctcccaaagtgctaggattacaggcgtgagccactgaacctaaccacaagtggactattgatagtatattcattgcacattttataacaagtttattgagatataatacacataccatgcaattcacctctttaaagtgtacaatcatttttaatatgttatcagagtcgtgcagctgccaccacagtcaattttagaacattttaatcatcctccaaaaaacctctttatccattggcaatctctccctattcttccctttccccaggccctagtaactactaatctattttctgtttctatggatttgcctattctggacattctgtagaaatggagtcatgccatatgtggccttttgtgaccaatttctttcacttagcatgttttcaaggttcatccatgttgcagcatgtatttggtatttcattcctttttatggccaagtaatattttgttttatgtatataccacattaaaaaattcatcatcagttaatgaacgtttgcattgtttcctgtctggggatatgaggaataatgttgttatgggcattcatatacatgcaagtttttgtgtgggcttatgttttttcccttttttctgggaagtatggctttggccaaggccagagtcaagcacatccttatgtttttatttctcttgtatttatatgtgtctgagagtagaatcgctgggtcatatggttactctgtgtttaaccctttgaagaactgccaaactctttttcaaagtggttgcattattattgttattattttttgagacggagtcttgctctgtcacccaggcaggagtgcagtagtgcgatcttggctcactgcagcctccgcctcccatgttcaagcgattctcctacctcagcctcccaagtagctgggattacaggtgcctgccaccatgctcggctaatatttgtatttttagtagagatggggtttcatcatcttggccaggctggtctcgaactcgtgacctcgtgatccacctgcctcggcctctcaaagtgctgggattacaggtgtgagctactgcgcctggcctgttgtattattttatactcccagcaacaatatatgagggttctagtttctccacatgcttgcaaaccttattattatctgtcattttgaattagtcatcctagtgggtgtgtaatggtatctcaatggatgttcatcaatgaaaataaacatttgaatgggcacccatggcatgtcagatgctctttcttaggtgtgggggcaaagagatttgcaaccttcggctgtctgtctctctggcctcatctgttttcacatctttcctcttgatttatgttccctaaataccaaactgtttgtagtcctcatactatcatgtcatttcttacttccagatctttgcctataatctaaatattaatgcagtgtgaatattaatgccattactagttaactcttaaacagccaataaattatagagctggcagtctggctccagagtctgtgttctgtactacatactctttttttcttttaaaatcaactttatatcgaagtataatttatatagattaaaatgtacactttatttatttatatatttatttttgagacagggtgttgctctgttacacaggctggagtgcagtggtacagtctcggctcactgcaccctcaacctcccaggctcaggtgatcctcctacctcagccttctgagtcactggtactacaggtgtgcaccactaaacttggctatttcttgtattttttgtagagacggggtcttgctatgttgcctaggctggtcccaaactcctgggtttaagcaaccctcccaccttggcctcccaaagttttgggattacaggcgtgagccactgcacccagcaaattgcacacatttaaaggtacattttgatgagtattaatgaatacatatgcctgtgcaatcaccactgcaatcaagatacagagaatttttctattatccatctccacccctttcattctcttcagcctccctgtagtccatatccccagtcccaggcaattactaatctgctttctgttgctatagattagttttgcctgttctagaagttcatgtgctctttggtgtctgacttctatttgctcagcaaaatgtttttgagaatcaacagccaagttgttgcatgtattagtaatttgttcctttttgatgctgaatgttttccgcggtatggatataccccaatttgtttattcattcacctgctgatggatgtttaggttgtttccttttagtattatgcagttaagtagctatgaacctctataaacatgtctttttctggacatatgtcctcagttttcttgagtaaatacctaggactgtaattgctgagttgtatgtaactttataagaacttgccacgcagttcttcaaagtatgtgtacctatgttggttttaatacagattcatcatttcctatccatgttgcttgggtagattatattaattcttaagaatcacctcagatatcacctgccctaggaagcctttttttgacccttctcatcttccccttctttgaggtgaattagggaggctccccctccaggctcccttaacaccttgatgattgagtgttcactggcctatctttcccattagactgtgagctccttgaagaaggaaaatgcgttattatttctgtatccccaggaccttatatagtatttaccatctagataggtgctcaataaggcttgtgaatgggcgactaaataggacattattcatctttatttttattttatttttgagacagggtctatctagttctgtcacccaggctggagtgcagtggtgtgatcttggctcgctgcaacctctggctcctgggctcaagcagtcctcccacctcagcctcccaagtagctaggactacaagcacgtgccaccacgctggccaatttttgtatttttgtgtagagatggggttttgccatgttcccaggctggtctcgaactcctagactcaagtgattcccttgctttggtctctcaaagtgctaggattacaggcgtgtaccaccatacccggcccttattcagctttgtaagggagtttatggccctgtaagggagataaaataggcatgcaaataactaatgtgaagcagaaattaatagagttgaagaacaaagtctgtgagaagtgaaagagagtgatagcttttagtgaggaggatttgggaaggctaataaaggagatggggtttcaactgagcccccaaaatagattagatgtgctgagatattattacccattgattctaaagggatttgacttgatcttctgttctaaaagattggtgaggctggaaaatgaagtttacgtttgggaaggtcacactaagattcatcttttttttttttttttttttttttttaatgctttgctcttctcagcctacagcgggcactaggagatactggaaatgttttctgtttggcagtagaagaatataaatgtggcggtttgtctatcatctctccagattctaaaggcttctaggtgggattgaaaagacttctcttatcctctttgcctcttaccccatatggtaataggtcacataagtcacactattgccaaagctctgcttagccatttgtctggtctctttggtctcagccacctggcttcactatttagcacatatttgtccattgtcttctatagcacatgttcatagactattagagctgggaactttcaaaataatcaaatgataggccctccctttacagaggagaattgatactgaaatctagagactaacctggttaataatagtaaagataaaagctgccatttattgaccatttaatatgtatcgtatatttgcatgcattatgtaatcctcacaaagtgtagatgtcttcattttacaaatgagaaaactaaggcaaagtttcagatggtatagacagaaccaggattcaaagccaggtcttttctctacagcatcctacccaggcaaggccccaggtccgtagagttgctgaccacagaggaggaggaagttgggccacagctctcaggtctatgagagggcgttgtcactgaagtggaggaaaccaggattctctgcttcctagagagacactgagattgttcctttaaaccacatatgatttttaaaataagatatgtagagcagaaaccaatcaactagcattggctttggtcagaattatttttatgataaagtagagcatatttttaaatttttaattatctaagtaatattcaaaaacacatttgcacagtaaaagcattaagaatgtattaggttgatgcaaaagtaattgtgttttttgccattacttttttttttttttttttttttgagacagtcttatctctgtcacccagtctggagtgcagtggcatgatctcggctcactccaacttctgtctcccaggttcaagtgattctcatgcctcagcctcccaagtagctgggattataggcgtgtgccaccatacccggctaatgtttgtatttttagtagaggcagggtttcaccatgttggccaggttgctctcgaacccctgaccttgggtgatctgcctgcctcagtctcccaagtgctgggattacagtcatgagccactgtgcccggccattactattacttttaatggaaaaaactgcaattacttttgtgtcaacctcatagaaggatggagagcaaagtcagagttcctctcgtgtctccaacccgtctctagcatcacccctaccttaggtaagaaccatttatagttagagttatccatttaatcctttttctatgcatgtatgtgcatgcatatggacaaatacacatagttttagaaggttaataaattgtatcattctttacatacaaaaagaacatgtcataagatatttctgtctgtacaaataacagtgttttaaatgcagcatatgtatttcatgatatagatacaccctttttgatgaacatttaggttattattattttagacggagtctcgctgtgtcacccaggctggagtgcagtggtgcaatctctgctcactgcaagctccgcctcctgggttcacgccattctcctgcctcagcctcccgagtagctgggactacaggcgcccgccaccccgcccagctaatttttttgtatttttttagtacagacggggtttcaacgtgttagccaggatggtctcgatctcctgacctcatgatccgcccgcctcggcctcccaaagtgctgggattacaggtgtgagccaccgtgcccggctggttattttaaagtatttgtttattataaatactgtggcagttaacatctatgcctgtaatactttatagtaccataacagtgatgttgttatggtgtagtacagtaggtgtatttacactgatatcagttacagcctggtgtaattacagttatgatgtaatgcctttagagagaggttggacagttcagttgctgtcccaaacctggctgagaagattacaaaagatttaaaatatttctactggtctttattattgaatgactacaccctctgaaaagtatgaattgagcattatgattgctcataggtaaaaggttagcaggcatttaatatgtgctaggtattttcttgtgtattctctcatttgagtcttataataatctcataaagaatgtgctgctattcactgtttatctggaactaagactgagaaagactgtggcttgcataaagtgacacagcttctaagaagccagttcaagatttgaaccctcatctgatgatcagtttgttttttctttccccattttctgaagctggttcattctcttaagaactgtaaggagaaaaatgatagaaggcagaatatctttgaactaatgaaatcatcgcatgagcagagaagcagagtgggcatcctgtggatttaggggagggagggggtggtaaagcctctgaacctgtcactggacttggaggtgtgattcatgacttcaggatagtggctatgctgagagaccttggtgtctgacagcaacgtcctgctattgtaagctatggatttactgtcatgctaagaaataaatcatgaccaggaaaggctgtatgtttaggtgctgctgatgcctgtaggccctctccaaacaggagaatggctctcagtggatgaattgtctcagcttcctctgagttgtaatttctatgtgggtcaaagggttatttttagcctgtgggatccctagctctttgaggagtggcctcgcttacaaggtcagtggagtgggatgatggtcgggattttttttttttcccagacggagtcttgctctgtcacccaggctggaatacagtggcgcgatctcagctcactgcaacccctgcctctcgagttcaagtgattctcctgcctcagcctcctaggtagctgggattacaggcgcatgccaccatgcctgggtaatttttgtattcttagtagagacacggtttcaccatgttggccaggctggtcttgaactcttaacctcatgatccacctgcctcggcctcccaaagtgttgggattacaggcatgagccaccacacctggcgatgatcaggatttaaggattgtttctgagctcttcctggaccctgtgttttaggtcccccaaagaaggtgtgaacagccttttggaatctgttttactctggcaaaataatctgtgtccatagattgcaggaggatgctgttggtgttataataatgctctcacatttaaaaataagttatcaagtgtatttgaggaagaaaactaagaaaatctggaaaaaaccccaccatcaacaaaagacacgcaaaactctaaaacttgtaataggataaatgatgttcttgtaatgaatgtgtcagcattttaacacatgtgtgctcagtgtgtggtgatgcaggatgtgtataacagaaagcacaaacgtggtctgtgtttacattaaatctcccacctccaagacacacacacaaaaggtcccacttgagtatgtgtaattacatctctgaatactcccttgatcctatttttttccttttccctaaacacatattttggttacttctccaaagatacatgatatatattagcctcactcagaaccacagggaacatactcaattgaatcacacctctatgagtagtgtataaagtgtaacattttaaaacaccagggaccagggctggcaaggtccacggggaatcctgaaggctggtttccagccacaactgtgctggaatgaaaatagaaaacaatgaggcatgtgcagagtcagcttttctttgtgtcacagctcagcagttttcctgctgtcctaaactttcctaaaaaaaaaaaaaaaaaaaaagctggggctaaggggaaatggtgcagttgcagttgaaatttttttttaatagtaaagactgaaaatataaactaacagctggtgctgtaggaacatgtgaaatgaagagtgaattaatggtgagaaatctcactgctctttgcttggctgtgaggacacgcgtaggaaggacttgtggaaacttgtttggtaaaatagaaaaaaaaggaaaagaaaaagctaagtaaccatcaagcctttttcaggagtgggggaaaaataaaaatttatatactctaaacttaaagctttatttatgatcattattttaaatatctgtaaatgcatctgtaaaaaactccagccaagacagagggagatgtgaattatcaagtatattgacttttttttttttttctgttatcagtagcatccttcagaaagtactgattaaaaaggaaggccattcccagttcttggtttatttgcctcatagcgcaccaagtcaaggttgagctggggccttattccagaaagcacaggcttcctttctgattggaaataatatgtattttgtttgaccttcagaatactcatggctttactggaatacatgggccaacatttgtcctggcaaggccagggcagtttaagataggtatccacagggattgctttatagagcaattaaaagcagtgggagggaggtgactgcagaaattcagacgtttgcatcctttctggcctaaaaatcaagtgagtaatttcaaaaagcagaatttgaaaacaaacaaacaagcacttctagaagtttctgtctgaacacttgagaattttgccaaggtcatagtgttctttattttttctttttccttacatgttactttctgaaatatgatcatagtgttcttttgcaactgatcttggtgtgaagagggggttacatcttatatattacacagtgctaatatgtgtaatattaacatttttttgaaagattgtcaaatatggaccgtggaaaacagtttccatgccgtttgaacgttatgttctttatgatgctttgtttataaaaatattgttagatagctagggatgtttactactgccagctggagttaggcctcatggtagctttttaaagtcaggctggaggtgaattcaaagcctaacacagagtttcaagttattgttcttatttgaagtaaatgcataattggagactgtattctgatttcttgaattcttagctatgccagtaattcttgtttcttagggccacagtttggttctgtcaaatgtgtagttgtagagatgataaatgagtactcagagattagatgaattcatatatggtgacattaagatgttttctttaataagaatacctattatatgggagtaagtgaaaataatcatgtcttaatgttgttgaaatcctgtattcatttgggggaaaaaaagtaagtactttgtattctgcttatgtaaagggatatgaaagaatgtatataactaaatttcttaatgcttcattttgcttttgatgtgcaaaatataactttactgctaggtaaaattatacttgaatattaacagttattgcatgagtttaaagtttcagttgagcccaatatatgggaaccacgcagtttctagtgattttcaaaatatagtcccataaagatgaaagagactcaatagctgaaataggtggtacacttgatttaagtgaacatttgctaacccaggaagaatcaggagccattccaacactgtagctgtgtaccatagatacaaaataatatgttatccaacttagtatgtatttgcttactgcagttgagaacgcaggagtggtcagtgaagtgtagggattagggaaaataattgagaaaaatgaggagaaagaaagaaaaatagatgttttggtaatctttgtcaaatgttttctcaaagaccaggctcagatttaaaatattatgcagatgtagtctttggcctctggtagtttctgataggaattcagccttgagttgaactttgagatgggttgttttcttttcgtttttttcttttttaattactaagtgaccaatctgttgtagtttgttgatctattttttcctcttgccatccttctgttgctttctccatgagctgctgtttattctggaatgttgaacatccacatttagaattaggatttgtgtggctctatcttaaccaggaatggaaaaaatccaacccagtctttcaattcatgggtttaagtggattcagagaggttctcatccacagtgacaggttcagaattcccacttctaaagcccccgtttcattaggtaatgaatatacaagctgagcccttccaggttcacactgtggaggcttctccactcctctgtcttggttggctttcttccttggggtgtttgggaagagtctgattacagccaacttctttccttgtcagttgattttataacacaaaccattaaagttcaaactttttgttcagcagattgatttcatttgtctcttctatagggatctcacttagagtttatagaattctttgctatcctttactttaattcattttggcaaggtatgtagtattaactccaggtgaggcaaccaagagaggggccctaagtcaaggaacttgttaatggcagagatgagcctggaacccaggccttctaggtccaaatgtagtgttctttcctctgtgctcccaaggttcccattgtatcctgtgggcttcttttttgtaacgtaaagtgggtagtgaggagaaaggaggttcttttctgttgatctttcatatacttattgatgttatctttatatttttatagaacttcctgatttaattaaacacttctcaaatgccatgatctcatttgttttcatgatgaccttgaggattagctaggacaggactatccctattttattttattttattttattttattttattttattttattttattttaagtttagtttagtttagtttagtttagtttagtttagtttagtttagtttaagatggagtcttgctctgtcacccaggctggagtgcagtggtgcgatcccagctcactgcaacctccgcctcccgggtccaagtgattctcctgcctcagcctcccaagtagccgggattacaggcccccacaaccatgctcggctaatttttgtatttttagtagagttggggttccaccatgttggccaggctagtcttgaactcctggcctcaagtgatccacctgccttggcctcccaaagtgttgggattacaggcgtgagccactgtgcctggcctcaaaaatgcctgcttttataaattgctcacagtatagtagagatttttacagtttggagggtgttggaggttaattttgttgaaggaagtaatttctctaatgtggaggaggtggtaatttagaagactatgttgtagaactgcagccgggtatatgtttacttttgtgagcgcctgttttatttgcccgtttatttatacctatgcattttgatagaaaaataaatatagttctgttttggctccctgaaatagtttttatattttctggaatttcctcacttattgtctttaatattcctaagttttattatgactcattttggtcatacaatagtagaagaagtaggtgtcggcctgtttgaaggggtttattaagtaatttggggaagtatatttttgaagcctataaatattaatttgtccctggtgttgagatttgtcttgtggttgtcagttgtgcatgttcttatatgttttggataggggagagtaaaaaggggttgagcatagtttatttttttctttggctcaaatatgtagttttaccataaaccacggaaagtttcctgttcttgtttgattaaaaaaaagtacacttccattcattgtttccatgtaacttcctatactttttactaaaaaaggttgaaatctaggataaattatgagctatctctcgggcaaagaaacgatttcatttcaggaaggagcttaggaagcgaaccttcttgagtatgagaaacagtaatagcccttggcatgtatgtgtgtgtgtgtatatatacatacatatacatatacatatgcctttccttacataataatgatttgcaaagagtgaatttggaccccgacttctaatcaacatggaaaggcagggaagattccatgtcatggctggattttagaaagctgcaaatggtattgtaccatagagcaggggtccccacccccaggccacggacctgttaggaactggggcacacagcaggaggtgagcagcgggtgagtgagcattactgcctaagctccacctcgtgtgagatcagcagtggcattagatttttataggagtgtgaaccctgttgtgaactgcgcatatgaaggatctaggttgcctgctccttatgagaatctcacgaatgcctgatgacctgaggtggaacagttccatcccaaaaccatcctctcctcctcggtctgtggaaaaactgtcttccatgaaaccagtccctggtgccaaaaaggttggggactgctgccatagaggggcctttgggtggccccgttaggtgttttctttgtgaggtggtgctttccagcctgccctggactctgtggttcatggtagatcattcgtactgacctggaccagggagcactggtaggagtatctgatttctatgaacagtgcttgctggcactgactcaagaaagaagacaggaaggaatggtgaatacaacttccattgagaaactagagtggaaaaaatgtgcaaattatgctaaaattgtaattaatctgggctgtacaggttgaatatctcttcatcctgaaagaaaaggggaggtcaccatgagaaaatgggattgagggaccataagaactttgtcatacctagttatacatttgtttttttctcttagaacttctgaaaagcttgaagccccagaagcaatagaatagagcttttagcatggttttgttgtgaactaaattcccaacagttcacctttagtgcataagcttaactttctttgatggtttgccattcaaattagattactgtggacagtgtccctaatattgtcactaatattatgatacagtatcagttttacagcaggtttgtgcatcatgaaggaagtcagaacgttttagtgagttacaaggaaaatagccatcaaaagtccatataggttactctgtggatgggttggggagccatcttctggtcttcatccagacttgattgacttaaaattgagtatataagagtgtaaaagatggtaagtgataggcttgaggcagagacacaggcctgcagccagaactggaaaaaaacccacaagtatgaaaagtataggcaaaactataaagcagccaggcacggtagctcacacctgtaatcccagaactttgggaagcagagatggacaaatcacctgaggtcaggagtttgagaccagcctggccaacatggtgaaaccccatctctactaaaactacaaaaattagctgggcatggtggtgagtacctgtaatcccagctactcaggaggctgaggtagggagaattgcttgaacccgggaggcggaggttgcagtgagctgggacggtgccattgcactccagcctgggcgactgagcgagactccacctcaaaaacgaaaccgaaaaaactataaagcacagaaatatgggaccatttggtagatatagtaactgaaatcacatcaagttttaataaactaattagtattcataatggcagccctacatcttcaagaaaaatatacaataagcgagtttcaggatgctcaaaatatttaagatggccaagaagaaattatgcatgtagtacattttaggcagattttccttaaaactgactaaagacacttacttttttgaaacaagaaaagacttagttatttggataatttgcttatgtggaatatctcattgccagtcaatgttgaataagtgaggcatttattgtgtggcggaaaggtggttctttgggccagatgaagtaaggtgggaagaaaggaatatgaaatactgagagaaggaattactactttaaataatagatgtagctttggtatgtttttctgtgcaaatcttgagacaaagccctttttgttggaggaaatggcatgcaagggattttattttcagtttgaccatttgcaagtattagagctgtctccatgggagaaaggtgagttccctctggcagtgtggtttacgaaggtttgcttgggaggaaaagagaggagctagttgatccagagtggaaaaacaccaaagcaaagttttctccaaaataacacacacggatttctgaaaaacagcagttactttcactgaatgtgacaaacttcaaaaaaaaaaaaaaagggaaatcagctttgaaacatcatatgacacatctgttttggaaggttgctttgtcagatacagatgtatgttttacagtatgttactatgtaaagtttcgtcttgagcaagctcaatagatgtttttctgaacaggtatctcatttatcccagttttaaatttttgggggagagtttattaaacaataatagtacagtactttatcttatttttaggttaaatacaatttgattgaattatacccttctctcttagccttttattgaactgatatctctgcttagattttatcctttcagaaattgcttattgacccgacacagcaaaatccaaactttttgatatatgtcatggcatatatcatgccaagatcacaaactccatcacatgcttttagcaaataaatgccagtttgcttcttgctttcatacctacaataatgcaaattattggtttaaaaagttaaaaatcactgattcttgctttattacaggcctcttaaattgagaccttggaaaagtattttcttgcaagagctgatgtttcctattattattattattaatttattttttaagacaaggtctcactgtgtcacccagactggagtgcagtggcactatcttggctcattgcagtcttgacctccctgggctcaagggattctcccacctcagcctcctgagtagatgggactacaggtgtgcaccaccatgcctggctaattttttaatcttttgtagagatgaggtctcactctcttgcccaggctggtctcaaacttatgggctcaaacaatcctcccaccctggcctcccaaagtgctgggattacaggtgtgagccactgcacctgcctgtgatttgtttcctttttatgatatctatgtgagcatcatattttcttttcatcctgcctgctagaaagcgcagagctaggtttggcactcaaatgatgtagtttcctttagctaagtgctttgatgaagtttctcttttgcatttttttttccagaacacatctcatagttgaagagatggtaataattacagtaatacaataataaaaatgagttgatcctaagaacagtcttatggggcagatcctgttattatccccattgtatagataaagaaacagaggcagggaatggctaagtagctgccccaggttaaaaggctaaaatgtggcagcgctgggattaaacgtaggagactggctccatagtccttagagaattagcagcttgggagtttggttgtttggcacatgaattcatcactcaacaaatgtttatgaacacgtgccgcatgccaggcactgtgtcaagcactgggagagaggaagtaaaagaaacacagtccttgccctcatggagtttctggtaagtagaggacacacaaacatatgcccaaataaatgaagcaatagatttataaaagcttatatttgctataaaggagtaacaggtgtaacagtttaagggacctctgaattttatcaggtgcaatacaaaagtgtagttctgggccaggcacggtggctcatgcctgtaatctcagcactttgggaggccaaggcaggtggattgcttgagctcatgagtttgagaccagcctgggcaacatgacaaaaccccgtctctacaaaaaatataagacatgagctggtgtggtggcacacacctgtagtctcagctattcgggaggccgaggtgggaggatggcttgagcctggaaggtagaggttgcagtgagcccagatcgcaccatggtactccagcctgggcaacaaagccagaccttgtccccgtccacttacccccaaaaaactgtggttctgaaccacagcaactgagccgagcacaatccttctgtctctctaagacccagtctacactgagtagttctgttgatggcactgcttgatgggcctgtaactgccacaagctctggaaaaaccaggtccacagcttctcagagccttttagcttcactgtgaaaggagcaagagcacaccagtgaccaggtgttcataatttctctgcaaatgtcagctctcagtttccctcctaacagaagcacctgaagcagcaggctagctagcctgaagaggaaggaatagagtttagtcttataattgggacctatatattaagctgaataatttggcattcagtgttaagcatttgactcattcctgtaaccaattgtgagtgccctgattatgtataaactccttaaagtaaatgtgttttagttcgtggcccagtgtgtacacatggctgtaattaacaatattttgcacagccaaaccaaaagtttgcagattttccttttttaatccatggtctcctatctgcaatcaggaccagtggttataggcgatgattcaactccccagcagttgtggtttcccccttctgcccttcctgaccctcttacagtttctcatcttgccacttgtctctgcttcagactctgcaccccagaccctggccaccagccctaacagaatgctcaccaggcccagagcatgccacatgcaatgcatgttattcctccgtgcttttgcacacattcttacctctctttctcccatctttttctttcttgctagacaccagtttgcaaatgataaaaaagagaaaattagtgatcatcttaggtacaaatcaaggtctgagagatgaacagatttggtaatgtcatccctcagggttaatgaggtgtagctttgtagctctgcaagtcttactttgccatcagatattgcattagtaggaattaagttgtaatttttttatgggataaagttcagtttaatattttgaatctaagtcgataaagcatttgcattttaataaagaagtgtactatccttcagttattttgtatctgccaaattcatagggtaggagaaaaaagatcttattttctcccatccttcaaaccttcagatttgttcttggtctctgttctgagccaattaggcagtaacatcccataaattcttatcccctccaaaatgaatgctgtagccagtgtctccttctgtttaagcttccttcttgtgagaagaatagggacaggtgcaccatattattggtcaaaagtaaatcagtgctcggtgtggtgactcacttccagtactctgggaggctgaggcagaggcaggtggatcacctgaggccaagggtttgagaccagcctggccaacatggtgaaaccccatctctactaaaaatacaaaaattagccgggtgtggtggtgcatgcctgtaattccagctacttgggaggctgagggaggagaatcactcgaacccaggaggcggaatttgcagtgagttgagattgcgccactgtgctccagcctgggcgacagagtgagactgtgtctccaaaaacaaaacaaaacaaaataccaaacaaagtaaatcagaagaactgttggccaagatgatgccaactgattgtctttatggattgatggaattccctggaggcagaaacatggcctgttctcgcctttgggagttgtacttccagaatgtgctcagagaacaggaatttttactctaatactgtgcatagtttaatttaattaaaaaaatttttttaaagagatgggggtctggttattttgcccaggctggtcttgaactcctggcctcaagcactcctgctttggcctcccatagtgctgggattacaggcatgattacagggagtacatgcccagctgtagttttattttaagtctttccagtgcaattcatagaaataatttctggggagtaatgctagggagtagtataagaacatcttatcttagatattttattaatcattctaaaagtttttagagaaaacagtttttgattggagaaaatgttctcattcatttatttctcttcccctcaagggactttatgtctctaatagtatttgaagtttgtaaagcgttttcacatatagtgcatcatttgatctataagtcaagcctgtcatagaataagagatcatggaatgcttaaaacccagctcctgtatctcctggttcactatttcccggtgcttctgtaatacaaggacacctcttgctatgtccagtggtgacttctgagacatgccactgcttcacttcaggtcataaaaaccatgaaacataacagcaccacttcctcacagggctgcagaaatccccctctgttggcacgtccagattgtatagtggtatcttgtttagatggaagagtatgtgccttttatagcttggcacttcccaacactttgagaatttggattcctaaagaacctgtgccctttgtttccttttgaacatttgaaaacacaattgaatacaggaaattctccaacatggttgctccatgatttcaacacaacaatacacaaatatgcactggcttttggcccaaaaagttggtggttgacttcttggaagagggttagtttgttaggaggaaggtttggatgtagattttgcttggagggtgaaagaaaccatgataagatatgcctaagagttgtgctgtagaaaaatctagtttttttccccctgagaaatccaaattacaagttttaggacttgtctacctttttcctactagggataagcttcagcctgaagccaggttttattgttgaaaaacccaggtaggagctgtggtagaagcgccctctttggagtttaatggtggtacattccaccgctccatccccaaggcgctgtagttccaatgaattgtaatttgagatggtacaaacatgagcatatgttatgtacacgtcaggcgtgtttgtgagctcagggcattccaggtgtttttttcttggagctttgtttttgcgtcatatcctgtgttggtaacattccttctcatgaagctcgattgaagtgaggcagtgctattggctgagaaatcatcctgggtgccctttcttacagattcttgcatcccatgggggtagaaaggattttcagcccaagggcagaatagatcctgtagtacccagtcccacaatctgtgggagtttgtccctctttgcagctgacagcatttcagaattccctgtgggacaataacaaaaaccttattagccaatggtgtcattagaataaaatctccccactgcgatgtcttggtcccagcctataatgttaccccttaattccctctgcatctttaccacttttattacagctgaacacacgctcctcattagaaccctgggtgatatggggaatcagagtgctgaaaattatgtggaataggtaccagatgtttgtgtcaacttggtatgcattggtatttagaatgcttgaggatcacatttattaaatgtgaaaattacttactatgtcttctccaaaacattaccccccccgccagtatttttgtccatgttgcatgaggtgtgatattagtaatttcttttggcactgattaaatttaaagtctgtgcagcaaatgcatctgttcccaaatgctttgtctgcgttctgtcgagttttggagctggcccaccgccagcagggatgtgggggttctgtaactgagattggaatgctgtgttgcagctaaaggacataatgaaagggtgagtccatttgatttttttctttaagtggaactgggaatttagacattgatgttatagcgagatcttaggaacgtttcccatgtgtccagataagcaagcattagtgaaaaggatggaggagggcatttggtaaaatgagaaacgagtttcattaagttcatgaagtcttttaagtcaaccaaaggtgatacgtgtgaaccgagcagtttattttattttagtagatatgaatgaatgtttacatttggcctatgcatctgttcacccagtcctgaggcgaggaactggaaagtacaaggcagaggcaggtggtgctctgccaggggaaaagtctggagctggagtctcagagacccaggttcaaatcccctattgccacttcctgctgatgtgtttcttagcctctcatgagctccagtttcccatcactctaaaatgagggcattaacactgtcttcacagtggcattgtgagaatcagaaacatgtacaagatgtgtggcccctagtggtgtggtaaccatacatatgaagagttaacccccagcttctcacacaaggcagcggcccagggagccaccatgtgcttcacagtgtggcctcaggtggcccagctgctgagcacccgagcggtgggggcctgctttgtgaaggaggctggtttggcagtggccttggcagtgtggccgtggtctgggccacctggggagtttctcaccagagtttatttgaatttgtgctgtcttcaggtcagtaaatatttttgtcagtagaagtagcatcttgtgggtgaagggggctgtgcctctgtgctggtggccgaggagagtgtaccaaacagaagagcagagcctgacttcagttcaaacaagacacgacacccggcaagattttgagatcagatttctcgagtaagccagcaggggaggattaaactcagctcacactttgagtccaaggaaaagttagatttctttgggagctacccttaaggaatcttgtactcgtcacataccagatgcccagaatgaactgaaatatccagattgggaggcaccagtgaggattgtctctggaggtgaatccatatggacattactgccaggaagcacttttctgaaatacacattctacctctgtgtggctcacaacagtttacttatagtgggttatagagtttctgtgaggctttggatgaagtatctgcaacatgccttttcatgatagagtatggtgtgaagtgagcacgcgtgtgtgcttatgagcattgttgctttcaggtgtgttctttcgtcatcgtccacgccctggttgatccttacgtggtaacacagcttttgctgtgctgctgataaggagcatcatcagagcatgtcactcacttggctcttgactgcagggaagagattgcgtagggaagacgggatgtgggttttcagccgtggccacaggagacactcccagccttttgaggctgccggtgagggcctacagtagcagctccagagctcacaggtcaccacaaaagtgagcagatgagtcagatggggtttcggagcatgttttcctggtttccaagccttcgtggctgggaggtgctatactcgggccccatggtggtcaagtgagaatctgagccactgtgttaactcaggcacttgtgctagagcctgtggggtggatcatgctgttcccaggtggaagccttcctgaatggagctggccctggcattgtgcagacagattgcggaaggaaccactatgaggccaagggggaaggatgggagacaggttcatgagctggctgtggcagagggaaagggacaggaaggctagggcctgacccagaagtggcaggatgaggctggggctgtggtgtgccaacggagagatagaggattgtcctgccacctggagagaggggattggccagaagagtgtccgggaagagaagacaaaaacagatttgtgtttcctgctttctgtgacagttgaaggtggggaagccccaactgggacttgattcttagcaaccaaaaatgccacctccttcatttcatggttggtgttttttttttctgccccttttagtataagagtgaggctttggctctcaggtaaagagtgaaagcaggaagtctgagacagacagtcccttattggcacaaagcccatgcagcatgcatcaccccatggttcttccccatttctcagcgataattgagtgtctgttttgtgccagatactgtgctggggtgaggcaggcagcagcagacagagtggttgggttctgttctttcgtggtgtttgcagtctttgggagcatgtagatgtgaaaccaataattgcacaaataattatgtacatctcatcacaggaagtgctgtggagagaaacggagagtaccatgagagtatgaaaaaatacagatctaacacagtgagggaggtttggggagcttccttgagagatcagtagaatgagcaggagtttgtcaggccatggtggtgggaaggaacagaaacggtggggaatgtgttcctggaggaaaccttgctattcagaggctcctttgggacaaaggttggcacttctgatgaaataaaagaaggcaagtacattaattagggtaggttaagctacaaatgtcagaaaacccaaaataacattggcttatataaaaaaaagagtttacatttgtttcctattaaaaaaaaaaaagcagttcagagctgatcccgtggctccatgttcatcaagtacccaggtggcttctcagttgctgtgccctcctcagcatgctgcttctgtctcatggccccaaaggcttgctctagtgctgcctgttacatccacgttccaaccagcagtcagaaggaaatggcagaagaactgacctccttcccttcatacaggaagctgccagctgctagcgggattgggaaacatagctttcgttctgggtggctgtgtgtccagctggcacttgaagaaaggagaatgatggctatagggagacagtgagcacttctgtgcttcaccagaatggccaaaacacgggagcaagtgtccgaggaatgagagacggggccgtggcaggaagcagggccagatcttggagggccttgtaagtcacgttgaggttttggggcttcatctggacagcagagatggagtgataagtcttttaaagcagagaaaagcaggatcagacttgggtttttcagatcagtttggctgctctatagaagacattttggtggagataagaattaagagcatcttgcagtaatcagggaacgagagacgatggtgcccatggagatggagaggaggggtcagagttgagtggccagagagagaatccattgggtgaggagagggaaggggtgatgttggggcacctcccccaggttggtgccaggtgtacgtaggaagaggctggtgccatttacttagggagggaatgaaggaggaacaacaggcacgaggggtaaagatcctgagttctgcatgttgagattgggtgtccatgagacaaaagtagatggtgaaggagctgttgaatattcaggcctggagcttagaaaaagaagtatgggccaggcatggtggctcacgcctgtaatcccagcacttcaggaggccaacgcaggtggatcacatgaggccaggagttcgagaccagcctggccaatatgatgaaaccccatctctattgaaaatacaaaaattagctgggtgtgatggcgggcgcctgtaatcctagctacctgggaggctgaggcacgagaatcgcttgaacctggggagtggaggctgcagtgagctgagagcgcgtcactgccctctcgcctggacgacagagcgagactgtctcaaaaaaaaaaagaaaaagaaaaaaaaggagaaataagtaagtctgagatggcctggagtcatttctgtaaagagatgagagttgaacccatggatgtgtttgagaaaatctatggaaaaaggatagtgcactccaggaaggcctggcaggcattttacctggaaggcggcgatggaacagctggtggcagaagagcgtctctccaagatattcaaaggaaaacttcatacaatcacactgcctctttcctttcttggccagagaggcttgttttttacccaaaggaaaccctctcccctgattcctacactgtgtctgttctcttaggagaggactactctaccccatacttagagtttaacctacgtcctttagcctgggtgttttcacagggactttttgtcccctcccttaagtcttaatttttttcacttgtacattctgtaccccttgcaaacttatccagttatgtttttcaggataaaattcctagcgggaagttgctgggtcaaaggatgtgtaccttttgtggggccttggataccactgaaaaattataccaatttgctctctcagcagcagtgtgatgctggcacactttttgaggaaggtttcttaaggcatttctgggcttaattttttttataagcattgcctccctctcccaacttttctttaatgaaaagtttcaacatgtagagatgttgaaaccattgtacagggaacatttagattccacaattagcattttgcaatagttgctttatcaaatatctctccatctgtcaatccatcttattttttgggaggtatttcaaagtaagttacaaaacggtagatctcacccctaaatctatgaccacttttttattttcacagaaagtgttggcacagtagcccaggcattgggctggatgttcaccgtacaatgcttggtcaccctttccctctcctcacccagtggattctctccctggccacttaactctgtccccttctctccatctccacgggcaccatcatctctcttgccctgattactgcaaggccgggcacttcaggaccctgcctcctgagagagagagccgcaaggagggccaagtctgaagctttgggtgactggggcaaccttgaaacagttacttaagcacattgagcttactttgctttctttaaaatggggttagtgctgcttccttgcaatgtgtcagaaggatatgcagcacctagcattgcatagtgggcacttaataaatgggagcagtctctctctctctctctttttttttttttttttgagacagagttttgctcttgtcgcccaggctggagtgcaatggcgcgatcttggctcactgcaacctccgcctcccgggttcaagcgattcttctgcctcagcctcctgagtactaggattacaggtacacgccaccaagcccagctaatttttgtatttttagtagacacggggtttaccatgttggctaggctggtcttgaactcctgacctcaggtgatccacccgcttcggcctcccgaagtgctgggattaccggcatgagccaccgcactgggccgagcagtgtctcttattacgttgtatgctgaactgttaaagataccatttcttatatgaccctggggatggtggtagataattcctgattttttttttttgtctttttggtgtaaggatagtttaatcatatgttgtagctttttttctttttcaatcttggagggaaaaaaattctatgaggaacttcgaaaaccaaatactactctattgtgtcagatggtcaggaacacactgttgagtgtatttaaacgtcaagccaagtaagtctctgtatttttatttttattttctgagatagggtctcactctgtcacccaggctggagtacaatagtgtgatcacggcttactgcagcctggacttccctgggcttaggtgattctcccacctttgcctcccaagtagctgggactacaggtgtgcaccaccacaactgcttttatacacacacacacacacacacacacacatatatacacatatatatatatatatgcatgcatatatgtatatatatgcgtgagtgtgtgtgtgtgtgtgtgtgtatatatatatatattttttttttgtagagatggggtttcatcatattgcacaggttgcttttgtactcctgggctcaagcgatccacctgccttggccttccaaagtgttggtgttacaggcatgagccattgcacctggcctccagtgggtctctgtaaagagtcgctgtcctgtcacttcatcagggtgtgccccatgcattgctttctcttttctttgaccttggactgactcatataaccaacccgtggctagagctctagcccttaaagagggtgtttgccctgttctggactctggcaaaacagagagcatagactctaaggcaagaagtgcacatcttcagcactgaaggcttcctggcactagttccctccctctttgggagtaccttattatttgatttgtttccattgagtttttgcccctgccccagtgtggaggtgagcagtatggtgatttaaggaagatcttaatgggtgatggtggcatcatgcagaggagggcagatcaaatagattgcaggcctttttgcagatgtgttttcagcctgttcagagctttgcacacatacaagaatggaactgaaaggcatttttatttgtgcttaatttgtgataattgtaaattcatggcaggaggctctgcaaccagttcagaagggtttcccagtgtgggtagctgtagccagtgtgtgtccccagaattgagtaggagtaggataatttcttgaagctctgggtgtgaagtataccagacatcccactgcggctgggaaagccggaggccaggagggcaggatgagggcagcagagggagcacctgcccatatggtttccccgcaccccgccaggggctccagggaatttacagtcagtacctcctgttgttgctctcgggacatcttccttcaccaccttatgctttctcagaaagcagctggccacagtccagagagtggcagtgactatttgagaaggcacatacttcatttcagaccagatagctattatcagcctagataatttctgtaagtcctgaaatagacttggcccaccaggcagggtgtctgcttctgggtgcagactggctggttctgaactttgtttgcaaccctggagggtacctttattatttagaagtcaggaagaacaaactggagtacattcaggcctttttcgtgggttctatctgggaggttgtggtgtagtgggcactgtttcagcccagtttcctgggtgattgaatggagacaatagcaccaagctcacagaagtgtgtgaggagtaagcatccagttccttcttcccctgggtatgtctctatcaatccagccaatgtgaaaggaggctgcagtgatgtcagggctgtagcagcctatttcccttattccctacagccaaatccaagtccctggaatggtgccctactcactgatctgagagggggcaattttttttaagctcaatgattcatttatacatttaacaaacgttttttgagcatctcatatatgccaggcactgcagatgaatgctgaggatacaaagatgagtacccacagccctcagagaggtcacattcgaccaataaagatggatgtgtacaccagtggctatcatgtaaatgcagtagtggagacaggcagatggattgcgggagggcagagaaagagagccttcctcagcttgagatgtttgttgtgggggcggagtgagagtggaagaggaatttgggtaaaggaagcaggcttgaatgaggacatggagttgggaaacatcctggtgtgtctggagacctttaaataagttgacgtggagtggggagggatgagacataggaaggggctagatcaagaagggcctcctgtgctctgtggtggagctcaggctttatttggtagggcagctattctgaagggacaggaacttcccacagagatgccaacggcaggcatttgctttgggaacacccgtaacattgagtgcctctaggttaggtggacagtgcctgtgtggaaggtggcatgcagagcttgagtcctcagactccgttcaggaaggtttgtaattgtctagggttggtaaagaagtagagatggagaggagtggatggatttaggatttaaggcttgactgattagaggaagagggaatgaagaagcaggaaccaagtatgaccagcactctactttttctatttgaggctctgctcagatcctacttcttttgggaggatttttctgacctctggcccaaattttgctgtacagctctggccctgatcgcctctacatgttacatcttgctctgtattgttcttaagtttgttttgctttccctaataaagggaagctctgaaaagataggatctgtatcttatacttttgttaagtgcaattttaggtatttaatattatttatgtatagtattattgggactttaagcaatttattttatctctgattttctaccaagagggaagaaggaattaaacacaaatgttaaatgggaagtgtcttctacccagaggaatgcattcatgacttgtgagtccaaaagggaatttaaaaaatcaaatacataccaaattatccaaaagaaatttaagagattgggattttagaagataggctagctttttggccacttagtcttggaacagtttacctggaaaggcatctctggtgggttggcagtggtttgatcacccttgcccctttggggcagaattaattgctgtttctgagtggcttgtgtttgtgattcccttggcaggtccagagcctggtgcactgtgtgaactgtcacctgtcagtgcctcccatcctgtccaggccttgatggagagcttcactgttttgtcaggctgtgccagcagaggcacaactgggctgccacaggaggtgcatgtcctgaatctccgcactgcaggccaggggcctggccagctacagagagaggtaggtgcaggtgtcagctctcagcccactgccactgagtctgcagagatgattttctggacagaagtccttttcttctcttctggggttcaacaaaagaagctcatgtatgaacataagagaacagatttaaaataccagctgctgtctggattgggcaactttaggatttctctgtctagagattggttggctctccccatttcctggccctccgtattggaaaaaaacgttcataagaatttcaacttttaggccaggcatggtgatggtgcacacctgtaatctcagcactttgagaggccaaggtgggaggatcgcatgagctcaggagttcaagaccagcctgggaaacatagcaagacctcatctctactaaaaataaaactaaaaaaaaaaaaaattagcagggtgtggtagttagcacatgtagtcccagctacttgggaggctgaagcaagaggattgcttgagcctgggaaatcgaggctggagtgagccgtgattgccattgcactccagcctgggagatagagcagaaccctgtttcaaaaataataataataatttcatcttttaaacatgattgtgagaaaccaaataaggtaccgttttctctgttgttgtgaaatgtctttcccatttcctcctgtgtcctctgtcttctttctttactttgtcatatgaacttattgcttctgcaggatgagtgaggggaaatgggaacactctggaataaagatggcggtactttgtacttgcctgaaaatccctgagcatagctccttatcactatctaggcagcttcccaaaggtggcggtgacattagcggagatggtgatgataaagatatatgctcatagttactcagcatttactctgccaaacactgttcgaagcactcatacagtaactccatgaatcctacaattatactcattttacaggtgacaaaacaggtgcagaaaacttatttgcgcaaggtcatcatcttcagagagaaatggcgtcctctttcctgtggctcaaaaatggcctagattgtgggtgaatggtcatcatttaagagtacagatttcccaacaagataacacagagtattctgtttttaagcttctgtgtgtcagaaatgttatcactcaggtattcgctctccagggagagagaaaccacaaaaaatcctgatcatagtgaagtataggaaaagtaatgcagaatggaatttatctttgagctttcttctggtcaagaaagttaatttccagagccacttgtttatgtgcctcagccaccccatccttttggggtggtaggaagaggagaagcacgagatgttaaggaaaagcaagctgattttaatctcatgaacgtgtgcagagttggctcatttcaaagacagatcatctaacctttccagcaacattggaaattattgttaatactcttggttgcttgccattgttgctgcaactcatatttcaggtcagatttctttatcccagtaatgtgcctttaattctgaactgatgggggagagtttgtggtgagagggaaaggaggagaggaggaaatgcagctcctatgaagcgttgctgactccagcaattctttagcagcgacaattactcattttatatatgcttctctcagaggaactcagagggaaaagaaagtccaagctgttacagaagcagcaacagcagaaaattcttgacgttaaattgtgcagtactgttgttgactctgaaaacaaattcgagtaagactactgaaacaagagaaaaatacctcgaggagtgacagcagagctctcctgcacttggttactatgttattcaaaatgggattcattttaggacctggcagtactgaggatacataacattagctggcatcagggacatagtgtgttcagtgaggaagaaaagaaagagggcctacaaagggtagtctcaaacttgtttaaaaacctgaacattattctctttcgatattagtatagtatatgtatgattttgggccagtgatttgaagatgtttctgagaatagacaacagacggacctttaagaattagatggttgtagttcaatactgtttgaaaacaagattttgggataactgatttttggagattccatctggctctgcgttgctcacatacggcagatctcagagtagtttgcatatacaaagtgagcatagaggataacatcagaatgagggtcaggacgagagaatgaaagattgtttgtggttggtaagatgggtgtgtataaggattaaatatcgctcactcttttgacatatgactatggagaacattcccgcagctatgcaaacagtttttaaaaatcatttgaaccacatgacccagcaattccactcttaggtatatacccgagagaagtgaaaacacatgtccacacaaagacttgtctgtgactgttcatggcagcattagtccaaaagtggaaaaacccaaattttcatcttctgatgaatgggtaaataaaatatggtatatccatacaatggagtgttactgagcagtaaaaaggatggcatactgataggtgctacagcatggatgaaccttgaaaatccactaaatgaaaaaagacagacacaaagaccacatatcatatgattccatgtatgtgaaatgttcaggatacagaaatttatagagacaaagtaaattagtcattgcttagggctagaggggaaagaaggaaatggaggttgactgctaaacgttacatgtttttttaaaaaagtggaggccgggcgaggtggctcacacctgtaatcccaacactttgggaggccgaggcaggtggatcacctgaggtcaggagtttgagactagcctagccaacatggtgaaaccccttctctactaaaaatacaaaaattagctggcatggtggcgggtgcctgtagtcgtagctacttgggaggctgaggcaggagaatgacttgaacccaggaggtggaggttgcagtgagccaagattgcgctgctgcactccagcctgagcaacagagtgagactccatctcaacaacaaaaaaaaaaggtggaggagatgacaaaaatgttctaaaattttaatggttgcacaattctgtgaatatactaaaaactgttgaattgtaatttaagtgggtgaattttatggtatgggaattgtatctcaatgaaactatttaaaaaaaccgtttgacctgctgacatgctaattagtctataaagtttacgttggctcaattcacttttaccaagattgcttactccttcaacttaaactcacctaatgctttttgttattttcaatggataacttggtttttgtagatatgtcatgatatggtctatgctaaaaataacagctgatctgttttgagggtaatagtaggagggccagaggcagcctttgtgcagtctctaccaattttttttttttttttttttttttgagacagagtcttgctgtgtcacccaggctggagcacagttgtgtgatcttggctcactgcaacctccacctcccgggttcaagcaattctcatgcctcagccacctgagtagctgggattacaggcatatgccaccgtgcccggctaattttttatatttttagtagaaatggagtttcatcatgttggccagtctggtctcaaactcctggcctcaagtgatccgtccgcctcagactcccagagtgctgggattacaggtgtgagccacctcacctggcctctaccaaatattaaaggcaaatatttttcaaaatgaaataagtgccgttacttacaaattagcaaaacaattaccgtgctggctccaagctgtaattgactatgactgaagactggagtagttggttttcatgatgtcatccttaaatgtgagggaattactaaatcagccccatttccccttggcttgttattggtgcaagatcagtatcaagatctattataaatcaccccatatctaatattttactattaataaattcctacctcccaggtgccttaaagttcttcagctggggagagatttttaattttcctgtgtagaggcggtgacagagcctacacccaaaagtagtaactgcagcaggttgacaagatttagggagacagtaacgcttaagttggatgaacagttttataggccagcagagaatttgtatcagaaacacacttgttacaacagtacataaaaagccctcagtaccaaagcaatgttttgtcatcggcctccctgctgggttctcctcgggtcagagtagacctattgtatttttcatctgagaacacacctctcatttgtaatcattggtttcggaaacaacagccttggaagcgaacaggaaactggaaaatgactttctggcaacagaggacagcagaagagcataaacaatgctgagagatcagatttatcttttagagcaagtgaggaccagtgtcatggtttccatccccatgaaaaccagctcctagtaccctctgactttgaagtaaaatgcagccgcccccttgtgtcggactcccgagtttaattgctcagggcgtttcctgattcctgagaggggttacagcaccattagaggcttgtttacagtaacatactttcattagttgctggaatggcaacaattttgtttcctatcatctaatttttacttgtgacctgcttttatgtggtggtgtgtcttttctatttctgacctatctaattgcttgcttattatgaaaagctgctgaggataagtcccaagttagccattacatatgtgtagaaaagatatggacatttaaatttatgcatttgttttgacattaaaggagcaatgggcgtgccagtgcctggctgtaggggtggagtggggatcaggaggctccattaccatgggaaaggggccaggtttaataacttcacccgtcaaaaagctcataaccctatgagcttctctgcctcattccaaaagaggatttgggatgagcctccagcaacaggcataccaacagtgtaagcagaaatacagaatgaggaccaagggaaaaagaagggtgcagcttgcgagccatttgggtttatgtggttggtatgattgtgtttgaaatttggctccaggctttttggcaggcacagacaaatgggatgtgtggttaatcacacatgtggctccaagtcacttttactttgtaccttctctgaggattggcataaagctgtcccttttttggttctttttgagggcaggaaagaccacagtggggagaaagagaaggaagtaaacactgtcaagtgctaactgctcgacttgcctcttaacagctctcacatcccccaaatgacaatactagcagccgtagtggtgaagactgcgtgtctcctgtgggccagccacctgccaggcacttgtttggttctgccagtcttgtcgtcagcctgaaagggaggcttggtggtcactgtttttgcagaagaggatgcttgggcttagggaggttatacaaccagatggtgagttgtggagccagcccccgagttgtgtctgttggattctacagtgcaagctgcaagcttttcccatactccagctagttgtcctttccttttagctcttacttggttctgggctacagaacctgctagtctgctgagtctgctttgttagacagccagcaagtaggtctgttagtgagggtttgggttctgtgcataggtttgtaataactctttgcagtgcttggagtcctttttgattcccttccttgcagctttggggcagtattaagttggtctgtgtgtggcagtgtctctttttttccctttcatggtttaggattatcacaccacatgtcagtaattataaaatgcagggctgagctcaggagccattgtgctctatgtggctgctaatccccatgctaaatggcaccaccaaggggccttttatgttcttgtctgttttcatagttaaacattccccccacccccaggccttcagctgtgttcacacaaatagctcacctgtcctctgcttataatttactacgtcttgtatccaaacttgttttaactgtgtggtaagagagaactagcatattaactgactcttcttgctaagaatgatatgcaagagcttcagtattcagacttcgccatctgatttgacatctttttgcttacattgaggaatttggcaattcaaagattgaccattttggagatctttatctacctacctacctatctatatgtaatccttccccatttccacaatattaatacacgaacaccttttctctttttccccctcgattatcgagattcagataatacagtgcttggggaggagtgggtgtgccttgcccaacaccactaaaagaactgatacaaaatctcaaggctgggttttgggagagtacatatgtgagagcaaaaacattaaactagctacattcttttctctatctggggcattttttaccctgctgctattcataaatgacttcctaatgcagtcctgtgcatatgcagaaaaaacaaaaaacccagggctatttatgtttgagataccttttatgtggtatgtactaagcaagtgtcaaaggaaacccctcacacacagacactgtatatcagtgaaatttggtttctaaacaaatacattccgcatataagcactgcctggtgtttgtttaaaaggaagctgttctggaaatcacccagcttgacagggaagattacctctgaaatggtcatttagttttccaccagtccttaacagatactgtcatgcattgcttcatgacagagacacattcagagaaatgtgttgttaggggattgtgttgtgcaaacatcatagtgtaggtacacaaacctagatggtatgtcctactacgcacctcggccatatggtatatatagcccatggctactaggctacaaatgtgcacagcatgttactatgctgaatattgtaggcaattgtaacacaatggtaagaatttgtgtacctaaacatgcctaaatgtcaaaaaggtacaggaaaattatggtactataatcttatgagaccaccgttgtatatgtggtcccttgttgattgaaacattgttatgtggcccatgcctgtactatttctctctctctctcttttttctctgtctctccccacctgcccatttcctctctcctttcttcccttccccatttatttgagtattactatagaaatcatttcattacctacaaaggcaactgaatctgtctgtccacataggattggagggcctgaatgaataggacactcatattatataaaaagagttactcctttacttgaagacactcaatgcaatttaaacaatgacaccctgctaggtcgtgtgaaggtgccagtccaggcctggaaaggggagcagggttagggacagcaaggcaatgcatctgctagctgtcacaacagaggacaatgcaagcgagagctggcactggtcacactagtcaaggatgatgtctaacactttggggcaagatgttcaatctaaaattccagctaactctccaataggaactctccaaaaatgcagtcttggacttttagaaaaagtgaaagcagaaatcagagaggtaatagcaaacaccggggtttaggaaacaaaccaggacacaaggctaagctaagaagttaaaacgttcctaccaagatgcaggttggtcacgtcacttaaatcctgtcattcgtcacagtaatatccagatgctgtaaagttgccccaggaaagtacagcccctgccccggcagagggactgagcctggttggactcggcctttttagaatgaggtaatgccgatttatgttctatgctggctggacagattgtaaaaacctgtcattattgcctcttcccccagatagagactgccttgacaccccctttttttttcgagacgagtctcactctgtcgcctaggctggagtgcagtggcacgatcttggctcactgcaacctccgcctcttgggttcaagagattctcctgccttagcctcctgagtagctgggactacaggcatacgccaccatgcccagctaatttttgtatttttagtagagttttagtagagacggggtttcaccatgttggccaggatggcctcgatctcttgaccttgtgatccgtcagcctcggcttcccaaagtgctgggattacaggcgtgagccaccgtgcccagctgaccccttttaaaatttgtccagcagcagcattttccaaccagtatggtgttttgtctttatggaggttagggttagaaccctgacctgtactactgttgccatggtaactgcccttggctttaaaaaaagaattatataatttcctgaaagtgttgttagacaatgtttttacaagagcactctctgcatttaaaaatgtgacattttgctcttagaacttttgggagagtattaaaaaaaagcaatagacccaagtcaggagcagctctgcaaatctgagatgcagatgtgctgattgggcaaaggcccagtgcatgcgtgtgcagcgtctccagttttccagcttgagccttctccttgccattgcttatctgcttcttgacattctgtttgagagtaaaaggaaacttaactgctaatcgctgatttaaatacttaaactctgcagaagtatttattgcattgacttcaatcactccttccacggtattttctaaatatttctgtgtaagtttagacacgtttaattatttcacttttctttcttccacgatgaagaggccatgtatgacttggcccctctgatgcctcaggtcagcttatttctcttttccttcccctgctccactggaatgagtgaacatctgtacgtccttctttcccttcttccctctctgtggcctgagctaatctctggggagaccctgatgatgcccctttgaacaactcaagggctgctaggactagagggtccctggggtccacctagccctaataccttaggggaaccaggccagagggtgtagcggtgacatgttcactattaaccaagaacttggtgctagcactggactagcccctcggggcaccaacttctgttgcagagctgcctctacacatctgcctgccccactcttgctcctccccagcttatgaagcctccagtgctgtcaagcactccctttctggcacctccctcttggtttcctggttctcattctaccattccatctgtttttctgtttctttctcagctgctcactctttcttcttggggtttttttttttttccccgtgagacagggtctggctctgtcgcccaggctggagtatagtggtgcgatctcagcttactgcaacctcaagcgattctcccatctcagcctcttgagtagctgggactataggcgcacaccaccacgcccggctaatttttgtatttttttcaccatgttggtctcaaactcctgagctcaagtgatccactcgccttggactcccaaagtgctgagcttacaggcgtgagccagtgtgcctaacctcgggggttcttgactgaggcatagcccttggctttctgttttcctctgtctcctctccctgaggtggcttgtctggtcttaggattttgcttgtcacttccttgcttacaactccaaaaactctgcctgggcttctccagtggaactacagtcagatggctgaagcatcccggctcttgggtcccatcttgagctgccaggtgcctcagatatggactggaggagtggctgtcactgtggttcgctcccatgttagatacagggctagtctcagctctgccactccccatgtgtgaccctgggtgagttacttaattccctaagccctgtttcctcatctgtaaaatggagatgttaatagcacttttttttttttaattattactttttgtgagatggcgtctcgctctgtcaccaggctggagtgcagtggcgtgacctcggctcactgcaacctccgcctcctgggttcaagcgattctcttgcctcagcctcctgagtagctgggaccataggcatgtgccaccacgcccagctaatttttgtatttttagtagagacggagtttcaccatgttggccaggatggtctcaatctcttgacctcgtgatctgcctgtctcagcctcccaaagtgcggggattataggcgtgagccactgtgcccagctagtagcacttctttagagggttcactgaccattgagaaatgtctctgtggcacttagggccggtataggtacagtcaactgctagctaacagtaatttttattctctctaaaatagaatttaagaaccctcccaggccagttctcctgaccctagtgctggcttttcaatctggcttccctgacccatcaatgtcaccagtaccatccatcttggaacttttgaaccatcttgtatttactcatcctctttttttttgtctttttttttggagacacagtcttgctctgtcacccaggctggagtgcattggcgcgatcttggttgactgcaacctccgcctcccgagttcaagcaattctcctgcctcagcctcccaggtagctgggattacaggcacccgccactacacctggctaatttttgtatttttagtagagatggggtttcaccatgttggccaggctggtcttgaactcctggcctcaagtgatccatccatctcagcctcccaaagtgctgggattagaggtgtgagccaccacacctggcctgcccattctctttaaaccctatatttggccaatcaccacattttattgacatttcctctgcaattgcccttgaatttctctgtttttctccacttaccctggagcctccttaactggtctcctgggactggcctcttcagctttagaccctgattctttctgtctagcttgtgaacctcttcataaaaccaaacttctctaaataatgctctcataatgaatttgtttattcattcacaggcctgttcaatgaatcactattaagaacccactgtgtgctaggtaggtgctctgccagattcttactcatttttatgtctttagcacctattagagttgagagagaatgaatttaatgaaacatgacaaataatatgactaatatattttaaaaatttgcagaaggccagctgtggtggctcacgcctgtaatctcagcactttgggaggctgaggcgggcagatcgcttgagcttaggagttcaagaccagcctgggcaatatggcaaaaccctgtttctatcaaaaatacaaacagccaggcatagtagtgtgcacctgtggtcccagctatttgggaggctgaggcaggaggatcacttgagcccgaaggttgaggctgcagtgaaccacgatcgcgccactgcactccaacctgggagacagagcgagacgctgtctaaaaaaaaaaaaaaaaaagtacagaagcccaacaaagggtgtgttcattctctctggaagtgagggaaggattcccagaagaaagaacatttgacggagggcttaaaagtcaaattagtgttgttgagccaagggatgggaggactcaatatacacagagtgggcgccaggtgtggaggaaagttcttcacctacacggtgtggctggtggacagatcaagggtgctaggcaggactgaattctgcctgctgcctgtttgtgtttttaaaatagctttaatgagatataatttacgtaccataaagtttacctgtttaaagtgtacaagtcagtggtttttagtatatttatagaaatgtgcaaccagtggcccataatctaattttacaacatttccatcaccctaagaagaaaccttgtatctattaacagtcactctcccattccctgtgtgtgccccccacgacccggcactagcccaaggtagccactaatctactttctagatttatctgttctgcacattcatatgaatgggatcatgcaatatgtatcttttgtgtctagcttctttcacttagcgtaaagcacttgaggttcctcgatgttgtagcatgtatcagttgtttcattcctttttattcctgggtagttttcattgtgtggctataccatgttttgttaatgcattcatcagtccgatgcctgtttttaaagttttattagttttaaagccacacccatttgataatatgttgtctatggctgccttctcactactgtggcagagttgagtattgtgtcagagacctgcatggcctgcaaagctttaaatagttactattcagccctttgcaggaagagcttggcaattcctgtaatagaggatgaagacaatgaagggggtaggctggggctgagtggaagatgagactggaaaggccacgtaaggatttggacttaatcctgtggatcggcttctcaaagtgtgtgtgctgtgtgaagcccctgcatcggatcccttgatgtatagattcctgagcctccccctgggcttaccagctaaaccccttgccccacgcccttattcttaattccacctggacttctttcttcagtctctcaattcttgccactttggaagcccatgcttaggtcttagctcttcaccaaacccttgcctgattgctttaccctcctccatttctttcttttctaaacatcgctctgaatcttcttccccctaccacaacctgtgccttcccacagtatggaattatatgttttattgtattacttgctgctgaatcgtgtgtgttaattctgcacactcagctggtgagtggactgctttcgggcaggaactaggtcttgggtctttttttgcattatgcaaattgggttattgcatggcaccaaggatgttatttagagtataactgaaagtcttcttaaatgactttccttttgcatagtgcatctttatttgctttgcattctattagtggacttagtgtttggtccctaggcccctcaacattggagctaagcaggtgtcctccattttgtatgactgctttgatttacttttttaattaaatctcttttaattaatcttattttttactctaaactgcagatctttgttcagtcttttccctagcccatttctaaatctttgttacattcttctttactctgaggggttttagtcatctgctagtaaactagttagtcctttccgtcagctgggtaaaaagctataaatggttttcaactctatgcagctcccttgggttgctcatttgatctgagccaggtttgaagttgggccattgagaatgatctgtcctcatgatgtagggggtgactccagccaattcttaatattgctggaattaattaactttgattcctctaactgaaagagggcattttactctaccgtgtattattaaataccttataacttgatttttttgattttgttttcttgctcagtgagtacttaaaatatccctgccgatatagtaatttgttccctgtttaatatggctttttcctttgtttactctggactcaagtctttgtagcttgttttctaagtcagctcaaaagttgctggtcattggatttggcagccttttcaagctttacccaccagaatcctacaggaagttgtgtgtcggccagaagagtctgtttatttagagcgtggtgtccagcagaagcaatccatttatgagggtctggtcttaaagacacaggcatctgagtctgtgtttggaagacctgctgctttggcttccattgcagccatgttctccatgctttcctgtccagcccgccggggcacctcagtggcactgctggctgattgaaggagtccttgtctctgagctccttggccttgtctgaaaggctgaaatatcaaggcccagatattagacagggttctagtccaaagcaccctacaataatgctttgtatttatggctttttttttcacctgaaccacagagtccttcagctgaacctgaaatttgtacaactcttggaggatgaggggcaaattacaggtatgacttggatacttttgaagataagagagctaatgagatgaggtgttactgattctcactgtgaagcaaggacagagcccagctttaggatccaaggtcactaccatagcctaactcttgcccggagctgaagtgtccccttgtgcccattatggcttaacttctatttgttgatacatgtgtacacacatctgatccattttgaatttgctccagcaagtcggtgatgtggctgtcggttctctgtgcctagcactgggcttgccacaggttagggactgcatgcctgtggacccgtttacgtggaagctgcatcgatgtcttcttaaaaggtgagtccccctcccagagtgaggtgtggcctcactaccagtgatgtgagcacataccgaggtgccttgggggagaggggcagagaggtatagcaactgctgagaggcctgagcaacaaaaggtcgaaagtgagctgtcgtacctctcagccctcgccatgcccctggggtcttttaatgacctacagttggattttttcatgaggtggaagttatattgaaatttctgcctcagaatagttcctgaagagcattgactctctgggagtcttaggtaaatttaacacttaatgaaggtaaaaacaatcctttccacattcctctgctcctcctctcaacctcaggtcagtcgatgtgcaagcagtgctttccttgggaggcagcagtttctgaaggtaaaggagaaagccctggtccaagggagccaaaggtccgttgggacacacatgattccgtgttgggcacatgggcatgtaggtgtctcctagccttgccaagctgtcttaaattcgggcatcttccaaaatcaaaggcaactgaagagcttaatttccaatgatgatacattttgcctcagtcatctggccccaaaagacttctgggggccgatcaccctcccttctattctgaacgccctcatcccctagattgtcacttggtgcttttggccagggggctctgcttcttccttgctgcgagttcttcctgctgagcccagcatccccgtgagggctttcacgcaggcccttcattgctctcggtatgttgtcagcccatgtgttgcagtttatttttgattcctgctttcataaggtttgaagattccactcatttttccagtggttgttaagatagtgagaatctaaatgaaatggtaatattaccattgtgaacaattatttttctaaaagaatcttttgtgttcatttttaatgctgttaagatctaattcccagtattttatttggaagctcttcaaatttcccaaatcataaaatctttcaaagcctactccaagttactttttcttgattcagctctcctatttgcatttaaaataaaaaggccagcctatttccaaatatggaaatgatctatgtttattagagatcagcaaagtgatatgggcccttgacttgctgtgaggttttttttttaaatgtgttttagagcaatgtacaagggcaatttttcgtcctgttttgtcatgtgttcttaaatacatttcctaaacactttctctggcttggtgctattactgtgtatacgtcctacatatgtttcctattttttatgactcatacttacggtactcataaagatttatcctttatcttggctctgagtaatgagcccacttgcacatttccagcagaactgtgggttagggattttacatttcattctgctggagaggcctctggaaggcatagcacaggcagcgcagcatgttccttgtaggcagtactcacttctccctgagggaacagttagctcagtttttgtgaatttactaatttttgttctctagcttttcctttccctttgccctttttagccattttgctgtttgagtgaggccacacaagagcatgaacagatgaaacaaatgctctactcctttttgctgctgagtaactgtggtggaggaagaaatggaaataatgaactgaaacgatattattacatgtggcaacaaactcaggcaaggagtcttcttgggtccaaataaacattcagacccatgagactatcataggccatgggtggctccattatacttaaaagggtataggacaaggaccacagcttacggcatggcagcaaggcattcctccttgttgtgtgccttgtgactgttcacacatcagttcatcagttcacatagccatccagagctctccagctgatggctcaaatgccaggagatgagatctctgtgtgtgtgtgtgtgtgtgtgtgtgtgtgtgtgtgtgtgtgtgtgtgtagttctctagtttaaaagccttaggaaggccgggtgcagtggctcacacctgtaatcccagcactttgggaggctgaggcgggtgggttacctgaggtcaggagttcgagaccagcctaaccaaaatggtgaaacccgtctctactaaaaatacaaaattagccaggcatggtgacgcatgcctgtattctcagctacttgggaggctgaggcaggagaatcgcttgagcccgggaggcagaggttgcagtgagccaatatcatgccattgcactccagcctgggcaacaagagtgaaactccatgtcagaaaaaaaaaaaaaaaaaaaaaaagccttagacccttgcgggaactagtaggcaactatgtaggaatagttttcatggtactctgtctcataaatatgccccatttacaagaatcactgctctcagggaagcccccagatgtcacttcttatcagatgtcttaaaattttccagtcccaatagcaagctgccttgtgttataattgacatattgtcttaccagattaccagggttacagaattgagagagttaacagaagatcaaattctcatgtaaaagggaaaagctttgctcactgtttatccacacctgtacgttttattgtttttatttgtggtattcctgactgtgataggctaaataatggcccccaaagatatatccacgttctaacccctaaacctgggaatgttgcctttatatagaaaaagccttagcaggtgtgattaaattaagaattgtgagatggaggattatcctggattatctggtggcccctaaatacagtcacatgtatccttataagacagggatttgatgacacagacaaaagggaagactgtgtgaccatgcaggcagagattggtggtctggaacccacaagccaaagaatgccagcagccacgagaacctgaaagaggctgggaacaggttctctcctggagcctctggagggcatgtggctctgctgacaccttggttttggcctagcaatgctgattttggacttctggcctccagaactgtgagagaatagccttctgttgttctaagccacccagtttatggtaatttgttacagcagtatgggaaatgagcacacactcacattagtttgagttccatgctccctcctgtctccagtttgtttactcctgtgttccccagctctgtaaaggacgctaccacacagttgccagggccacagtccttggcattattatccatgacttcctgtgtttgctcagatgtcatatccaatcctatttgttctaccctaagaccatattctgaatctgcccacttctgaccaccaccttcggtctgacccaccatcacatttttacttgagaggcagtgggcctctggcccatccctcttaggagtgcaagatctggggtagagcgccagtgttggaagcctggctacactgctcatgagctgtggggctttgggcaagtcagttaacttctttatgcttcattttcctcatgtgggcataatcatagtatctacttcatagagttgctgtgacgattaaataattaaagcatgactggtgcttagaacagtgcgtggaatatcatcagcactccataaatgtcagctgctatcattgttagcaattaagatctattctctaagtggcagccagcatgatcttttgaaagacttccgtccagtcacgaagttcaccagttcagcttcctgccatggttttttacatttcaatgaaaatgcgcaatccccaccagagccctgaatgatcttttcccccttctcccagcactctcaccattgctcactgtgctgcagtgggccctgacatcttgcctcctgtccttggcatgggctctttgttttgcctgaagtacttctcccagttactcatgtggctgccttcacccagtccctgctttgccattacctccactgagaggccttcattgaccaccccatttaaaatagtcatagcaccccacaacagacacactctcttttactgttttactttaaaatgtaacttatattaccacctgatatttatttttaaatatgttcactgtctatctcttctgctagtatatcatcagtatagatgttttatctttagttggtattgccaggaattagaacagtgcccactacatagtaagcagtcaagaaacatttgtgaaataaacatttgcatgaataaataagtatgttgatgtagcagtttagcaaataggttaagtctagaaattctatatatggaagtttctcattaattatattttttgaagatctagttattgatattggtatgtatggcttgggcataaagtaatgtttcttaaaccaaggcttcaaggtatagaagacagcactggattgtgagtcttaataaaagacttccctcttttttggtcttccctctgttgtgatcttttttgtttaaacttgagggcaaatgtgtagacccatttggatctcagtttctttttttattttctgtcaatataaagacattgagaaaattaatatttcaaaataccaattgagaattagagtcaaaagcatttctggagttgttaaactacaaaatatccttaaagaaaccctcagcattcagtgaataaggaaccacctaagagctgaaatgtaaactaagggtgtctcatgtcttcttatgtgtgttttttttttttttttaacctagattaagtaggatttacagatctgggggcagatctggtctctgaatacttgggaaaatgcttttgagtttcattgcttatatcttactgccttgcacagtaaaaatttcatgattttccaaagagctctactgtttcgtcaggacagagtacatgtgaatctttccctgtctttcttttatttattgaaatgcagaagattagaagaactaattatttcagtttgttgagtggaggcctctctccacataaattagaaccaggcagttggacagtcagctgcagctgcctttgtgaactgggcaccggtgcaaagcattgcaggagtgaggagacaggcagccctcggagctcacggtcaccgtgcatccagggacaaagagcaacacctgtaacagaaagtacggagacgtagaaacatctcatcgccctaaatacacgagatagaaacttaaccaaatagatgtaatcaactacagctgggctgagataaacacgttaagtgctaagtaatcaggcatgttagggggatgtggggctggggctagggctggggctagagctggggttggggctggggctgggggaaggcattgctggaataattggagccaggtgtgcttgcctggtgctgctttttggaggtgagaaattggaaaggtttgaaatggggatgtggtttggcagagggctgaaaggagaattttccaagactaggggaggagactggtaaataaaatagagccgagttgagtatgaaatatgttgaggacagcaagtaccttggcagctgtgaaagcttcatctgatggttttgcctgttggtgttgatgctgggagaatggtcttcagctgaacaccacaggtcttcaaagccaggtgaattgtgacagcctgtgacactggaaggggcagtgtagacaggcctctgaagataaatgtttgtccccagatttccccactacagattgggagaaacctctagctttacctcacaatccagtgatgtcagctgccttggaagcagttccttgctttggcacttcctatgttcctatttttttggaaggtacctgccagggaggaaaggcagcgagcacaggtgattgagtttttgttcagagatttggggtaacctcagagtagatgtggtgttggggtcaggtgtggaatgaatgtggtcttcccaggacctttgtttgttagattcagaagtctccagaactacggtgagatttggggagcaaaacctgagcttgtccaggttagtggtgcctgaacaggaacaactagcaaagatgttgatgtttgtgctacctttcggccctcgtctttaatgagctccaaatcccaaaggtgaaggaaaagcagacaaatgacagaacaaccattagttcctcatgaggaagccaagtgtttggagggtcatgtatgcagctgccaccaatttgtcaccctgcttgaaaatccagggacctgtaggcaggaggtaatggcactacactgatcagagccaaagtcaaacgctggtaggcttctttccagagaattacaaaacctggcattttatttgtttttttcaacacccctggaagggagattctgttagctctgttttacaggtgtggaaattgaggctaagagaggttaagtattctacccaaggtcatgagctgggaaataattggtagaacctaaccttgaattcacaacacacttcctatagatggagttgacatgcactctgagtggctctgggcaaggtgggctttcccaaggcttaggcatttattcaataatgaaatcattatttattaagcacctgtttgtaatgtgtcaggcacagtgccaggcactggcagtcctgaccccctacccttgagaatttgccaaaggtaacaaaaacacagtggatagtgagttctcccttgctcccgctcccatttagatgatctcaagctctttactttgcttaaatgtgggcttagatgttgcacccagtgttgcgtgttgacttaatcatatgcaggtaagtctttgagctgcaatgaaacagccatcaggtaagagttaaatgtgaatagctgggctgtcatctataggtgaagagcttagaaagaggggcaggttagggcaccctgttattaacatcagctctgttctatacaaacaattctcttactggattacctgtgccaaaatattgctgaatagcttggaaacaggttagtattttgccctttagcaaaacagacaaaagaaagaccatggagttgaatttggaaaggaatcttggaaaatgaatgtttcagtacaacaatgtatcattcacatgcccagaaattcagcactgcagggctcctgctggcagaatcaggtgaactctgggatgcattctgatttggtcttgaattcttgcatgtcttgagtaggttgaaagttggttatttttgttttgctggcagtggcctttacttagaagtgcccaggagatattcttgggatagatgccaacaggctttgtgtcttttcccttcaattttataaaaatgtaaatgaaaggatttcccagcaccaagttgtggagctacctgggtattcaagtgacaggaagagttggttgttagggtggttaggaagggcttcttagaggaagcgtgcttgaactgagacctgaacggtgaaaaggcgtgaactatgccgagatctgggtgaagaagaggccaaataaagggcccaggccctcagcttggaagcagcttgttggagatgagagaggggccagtatggctggagtggagttagcaagggggagagtggtgggaggtgcgattggtcattgagggttggatcacgtggggccctgcggagtaagaagttgtttcttggcatttctttacatttctgtgttcttatctagtgattaaaagagctgaccctaaattctgaagacttggggagtccgtgtttgctaacaacggagaattggttctataaggagaaatgcgaatagttccactggcaagggaagtagaaactagattactagagtggatatttgggctctagtcccaaccatgccataaccagctacagaacttgggcaactcatgacctctttgggcttcaatttccttatctataacaaacatttggagtagaatgtctgtaaaatctcctttctcactagaagtcaatgattttattatatataaatttcatttttggttttatccttttgtttctttcagacttttaccagtgatcttacagtaaccaagtccactcactagttctgatttcactcttttctctattcctttgcttctggagtagccagtgaagtacttggaaaaaaaaatgtcaggagggaaagagagaatttcataactttgcacagtgtactcaacagtgcatatttaacacattgcctgttgccctgaaagaattcccaatcaccgcatgagtcgattgtgatgaccgagacttgttctcagactagtgatgtagggtttaaccaaaaaatgccattgtccttactgaggaggatttatcccatcaaaacggcatttgagaacctgacagtgggatactgttgtttgcatttactcttttttttaaatcatattttgatttattggaaacttatatttcaataaaaaaaacctgctcatctttcagtatcaattatacaactctctcattgaaaagtatatctaggccgggcgcagtggcttacgcctataatcctagcactttgggaggccgaggtgggtggatcacttgaggccaggagtttgggaccagcttgagaacatagtgaaaccccatctctactaaaaatacaaaaattagcctggctggtggcgcacgtctgtactcccagctatttgggaggttgaggcgggagaatcacttgcacctgggaagcagaggttgcagtgagccgagatcgtgccactgcattccagcctgggtgacagagtgagactctcaaaaaaaaaaaagaaaagtatatctaaaagaaattagcaagaccaagtatattaacttgtttttagactactaccatgtcaacacttcctattttaaaatgcactgtaaatcatggtttacccttaggattagctttgagtatttcattatttgttttgcttctgccaaatgtaaaagactaagtgggcacactgacccagaattaaagttaaggaaagcaaagaaactctctaaaacaaacattatttaatttttcaagccagcatttcaagacattttcacttgttgaaaggagaaagcacttctattttgttctctagtattcactttggcaggctaaactaaactttttaaaattgttccttttaattgagtacacagatcattttagtgtgacatggcatttatgaaattgataattcagtcacatcaactcatttattgagatacattcatttctagagatcttttgttttttgagatggagtcttgctctgttgcccagactggagtgcagtggcgcgatctcggctcaccgcaacctctgcctcctgcattcatgcaattctccctgcctcagcctcctgattagctgagattacaggcgcctgccaccaagcctaactaatttttgtattttttagtagagacggggtttcaccatattggccaggctggtcttgaactcctgacttcaggtgatctgcccgccttggcctcccaaattgctgggataatgctcatgagccactgtgcctggcctagagatctgtcttgaagacttttactgactctattagttgctgaaagaaccataggctctagatttataggtggccatagagatagagtctaaccttttcatttatggggagactgaagcccaaagtaagatacttaagccaaaaaaaaaaatcatttatttatttatttttattatttttagagacaaagtttcactatgttggccaggctggtctcaaactcttgtcctcaagtgatctgtccgcctcagcctcccagagtgctgggattacaggcctgagctactgtgcctaaccccctttttaaaatgaatgatatgtcaggatcttacattaggaggaaggcaaaattggggagcaccggggtttgtggtttatagtgaaagttaatttcctctgtttctcagacaattaactttttttctccttgagggcaaacaacaaatgattattttctagaaatcagacaatcctatttttgttctaaaatttcatgccaacaatttacttactttcttctttgaaaagaatgagagagattctgacctaaaattgtctgaaatgtgtactgaagatgctaatattgtattggtaggtcttgccaagatttaagagggcatctcagaaagacattgtacaccattctacaatggtaacttgttttcaccttagagatgataaagtagagggatagataagaggcttaattcagctcatttcttacacagtagagaattatggatagaacttacagacttttacataaaataatgtaaccaggacaagaattaccaggccctataagttgttccttatagaaatgctcaaggctcctagctcagttgcttaattcattgatagtttatggttataccccaaactcaacaagtgtttattgagggactatgacctggggacaaagccaaggaacaaactcctcaagtctaggagatttagggttgagggctagagtttgatttttctcaccatgcaagatattccttggtaattcagcaacaatctaaaggtaccctttagatcctaaacaaaaatgggatcctaaacaaaaatgggatttaaaattgttattagatttatgaatgatatgttttcttttgggcaagtaagtcaggtaatggaagttcatttagtgaatcagtgcagtaatgtggttaactaagtgacacttactaagccagaagttaatgtactcattatctatcaggaagcaaatcagggtctatgtctctgaaaagcaaatgatcgtctttcattaactggttaagcttggctttcaaggctcattgtgatctggctccagtaccctttcaacgacattcttctttattcttttttgtatttccttagctccgtctgaattaagtattcttcacacccactcatgctgcctccactgccctcctccttgtctggaccccttagatccacctttccccattcaccctctggcccagctgaagtgcccccttcctgctgcccacagatgtgtttgtatctgcctgtccctctgcccccatcaaactgtgaacttcttgagggcaggtattgtgtctgactcacatttgaagtcctttcattacttagtggtgcttcccaaatataagtttatatgtgctattagtcttcacagtttgtgtagtattcatatattatttgcattatttaccttttttttttttttttttttgagacagagtcttgctctgtcacccaggctggagtgcagtggcacgatctcggctcactgcaagctccgcctcccatgttcatgccattctcctgcctcagcctcctgagtagctgggactacaggtgcccgccaccacgcctggctaatttttttgtattttttagtagagacggggtttcaccgtgttagccaagatggtcttgacctcctgacctcaggatctatccacctcggccttccaaagtgctgggattacagatgtgagccaccgtgtccggcccataatattttttcttaaatctactcacttaaaaaatgactttagcttcatcctcaacttcctaaacatgaaatcatgtttttaattcctgtaaaaatatatatacataaagtatatcttaaaacattcttattatctccacactttgggaaggattgactgagtaaagtgctttacacatagtagccattcagtttctgaggaatgaatagtaaatgcgcaaaacataacatgagaacctcttttccctgttagtttagtaacttcacgcttattaacctagagataaaaggaggagggtgcagctagaaaagactgagcaagcccgtaagccaagccattcattcctgtctgtgaagcatttaggtgttagatattactaattacctcttatgcattgcaaactgctgggctagaggggcctatggaacaataaattttgtggattgcagagtccctgctgacttactgagtgagcctctgctgaaactccagaaattgtgtaagtggaccccttccccacaaaagattcagaaagcagcgcactatacatgggacacatcctagagaaaaggggtgtggtaagtatgtgtacacatcacatggttgttgttgtatttctcagtgttcctgtttggggcagtttaagttacagatttctcactaccactaagtgttttttaggaatgcattgtgtactgccaacataacagaggtctgaaggatttttctataaatttgctaatgggaattgtatattttttaacctaatttttgaggatattgtaagattactcaggtagaccaatttgagtttctttaaaaagaacaagttcctatatattcaagctatagttaacatagttaataattaaattaatcatactaataaatattgaaggctcttataaatccatgaagagatttctgtcttagttactatactctatatttgctgcttctatagagtgtagaaatagtatgctgtagtttcttatttattatgtaaactgcagtatagatttagggtggcagatcagagactagaacaggtgatttttttcatttggtgtttaataaagtttaggtaattttttcttaaatctgtaggaatcagtctatgtaagttcagcatgggataaagtctatttagggttttatgagaaaaatcacccactcttttttttttttttaatccagggttgggatcaacagttgttctagcatgggcagggtaacttgatataatggcatacatttttaccctggtctgctcttagagcaaatttgaaatggttgttttggaaaatgtgctatgagtttctctccagacctttgcaccagggcaggcagtccagcctagcaaatctttggcacttgatgcgcatctttcataacagaactttgatgctgagactcagtgtcttgaaatcagcacaacaaaatggtgcctgaggagcagtgtttactttgatcattcttcaacttctgtgccccagcctttcacagagcacaaattgctttaccagagttacggtgctgaagcccacgactgtttttgtagtctggttgctgtggtgatccttagccttccatgaaactcccatctctagggaaatagaaacctttgcagctgtctcggcctttttggttttgtatctggtggaggtcttcaccgagcttgttcaagcctgagagtgatcggtttgtgtcagagtaaaatacacacatggaaacagggcatccccttcaggatgtgttgtattaaaaaaaaaaacaaaaaaaacaaaaacacagctcccttatccttctctccaatcatgtggggcctttgaagtatctccaagtctggctagagtgaagtgagccttggagatgttgttggtcatgatagtgctgtgagtaagctttgggagcgtgactcaggaagtggggtggccaggtggggaagaaagagagtgggggcaaaggggaaggttaacagggcccgtgtgtgcccagagagaagttggtttaggaggagaatgtgggccgagtccaaggatgccagcagcttgatgtttagaggactatgaggaaacccgttttgacttgaagcctcaatggaggatggtatagacaagagcttccttccataggaaccaagggaatggagaatagcagctgtggttttagtgggtagaagtaataatagctaacacttagagagtgcttaccagatgccagtcactgttctaagtgctttcgacaaatgacagatttaaccctttgacatctgatagaatagatacaattattatccccatgttacaattgatgaaactgatgtgagtagagtcttaacatcctcgaggccctagggtgggtaggtggagagctgagattccaacctaatgcctggctctgagtcactgttcttaaccaccaggtcaaactgcctgtaatttagaaaggaaggcagagtgacccaaaggattgggttacgggagatgtggccaacttagaagaaaatgtagatcttggaagagatgaaattatgctttaaaatgtgtgtgttgattcatgtattagtccattcccacattgccataaagaaatacctgagactgggtaatttataaagaaaagaggtttaattggctcacaattctccaggcagtacaggaaacatagcagcttctggggaggcctcaggaaactttcaatcgtggcagaaggcgaagggaaagcagacacatcttacatggatggagcaggaggaagagagagtgaagggcaaggtgctacacatttttaaacagccagatcttgtgagaactctctcatgagaacagcactagggggatggtgctaaaccattcacgagaaactacccctataatgcagtcacctcccattaggccccacctccaacattggggattacagttcaacatgagatttgggtggggacacagatccaaaacctatcaatttcttcattcagtcattcattcgttaccaaatattaatgtaattcctgtaagtgctagatactggacaaggttctaaggtgataaaaatacaagtcccaccccatgctctgagatagtttatatgtacaaagttaatacaaggcagcagattctggatgctgtaagagatgggtcaacaggacataggtcagtaatatcctctggacacaaagtcttctattttttttttttttttgagatggagtttcgctcttgttgcccaggctggagtgcaatggcatgatctcggctcaactcaacttccgcctcctgggtttaagggattctcctgcctcagcctcctgagtagctggaattacaggcatgcgccaccacacccggctaattttgtatttttaatagagacggggtttctccatgttggccaggctggtcttgaactcccgacctcaggtgatcctcctgccttggcctcccaaagtgctgggattacaggcatgagtcactgcacccggccaacacaaagtcatcttaaagagcatggctttttttttttttttctgtgatccaatgtgaaaatacaaaacagtaattaatgcatttatccctccttccagaaagaattgagaagttactttgctgagtttgtatatagtttccaggagtaaaatagttcctgcctcttactgctatagagcagcttcccattctcctctatgtcccaagactaacacccaagattaaagatgggggtgggtaggtagggggagagacagacagacagacagggagagacattcattctacttccagcactgtcattttctagccatatgactttggcaagaacaccaatttctttacctttaagatgggagtaattagatattacgcagagcacttccttttgatgagagcagcaaatctcaacaggagccatggatctacctattgtctttccttaggagatgatgatgatgatggttattactactgctgccaccatgatttttaacaataatccaagtgcggtgtttttgaatgttcatgtcttagtaattactcctctctggatttctgatttctgctagcaaggtaacactgtactcctaaagaattccttaccagcttcaggttaatatactttctaagattgtactttagcccaggggaatccaaatgccatcctttgctgctgagagcatcttaaatcgctacctgactacaactgcattttgtggggttttgtttgtttgtttttgctattacaaattaactaactttaagatgctgcttaaacagaaatccttattgagatcttacagccataataggttcattgtccaacgtgcgtggcaagtcaatacactgagataccaggttgcagcagagacagaggtttaattgtacagctgctgaactgggggaaaactcaaatccatctcccacaggagtttggggttggagtttttaagggttttgggtgggctgaaatatggagattgttgatgggtcgaagagtgcagggtaaagtcgtgggacagggggatgaagaaactgtgttctcatgctgatttggtggttcctttgtgggagtctttaaactggttggtgtcagctgtcccgttggaattcaggatctgctcatgcaactctcaaacaaaacccttaggattctaacatcagacatcctatctatctataggagcaatggggatgcaaatggtgagaatctagtgctatgtgacttggttacaagaaactaggtcaaagagcagcatgttaatgcttaattatattttctgtccggaattcttgttaacccagtgaggacagcttcaatctctgactgcacgtagcaggtggaatgattactccagtactcagattttgtgggaattgagttcctgctatgcttattttgtaaatcagcttctaatgatcactctagtgattctctttattatgcagtttgatacatcacagtactgatgcacaggccattctaacattctgttgttggtaaagacatatacatgtgagcatactggcttactaaacaggtatgtagcaaagctaatttgaagcccattataaaatgtagaaattaggctaggtactgtgtggctcacacctgtaatcccagcattttgagaggctgaggtgggaggattgcttgagaccaggatttgagatcagcttggacaacatagcaagaccctgtctctacaaaaaaaaaaaaaaaaaaagaaaacaaaattagctggttatggtggtttatgcctgtggccatagctacttgggaggccaagacaggagattacttgaggagttgaaggttacggtgagctctgattgtgcaactgcactccagcctgggcgacagagtgagatcttgtctcaaaaaaaggagaacttgagaggaaatacgtttgtatagcacatagttatatggggctttggttacatattagtgttaaaaacaaaaagtgatctgaatggatgtatttattaaatgtgacagggaatatatatatataaaaagcaaactttccctccattttaatcaatttgcaaatattgagtttcttcagtttgtctaaaattttaatttctaatcattctaacacacttaattgcctacatgcaaacccgtgtaaaattctatgcctctaaaagatagtggaatatttgctcaaaatattttatctttgttatctatccctaaggaagaaaacacgctccaaaggttttttacattttatgtgtttttatttgcgtaactgtttaagataacaaacattttctattttcttttctttgccttttatggttcccatggatggcccaagtgccattctacgctgtcttacacacagagaggatgatgatcagggtggcttgtcctacaaagcctgggagtggccttggcatgctgtccagcataccttccaggaagcatctccgtcatttgtttcagtagctggaatctgcttatcttgactgtgtgttaatgttctgtttactatatacaccccaacccccttgttctggccagaaaaacaggtcaatatgactctgtaattattatcctagtcacatttcattaataacttttgttcgttccttcttttattccttctttcagagaacttgtggactgcctactagatgtcctgccctgtgctaggcctaaggatgcagaaatgagtgtgactcagtttctgcccttgaagaatgacctgaggaatttatactgtgacaggggggacaaacatccaaaccagggcgtccgatcttttggcttccctgggccacattggaagaattgtctcgggccacacataaagtacatgaatgctaatgaaaactcatgaacgaaaaagaaaaaaaaattgcaaaagaaatctcataatgttttgagaaagtttacgaatttgtgttgggcctcattcaaagccatcctgggcagcatgtggccgtgggttggacaagcttgatctaagcagttcattatagtgccaggcagaggcagaggtagaaacaccagtgctgtctgagagagctctggctctgtctgagggagggggaaagattttactggagatggcattgtgagctggacccacaagtccatccggagcactgtggtgcactttaggccagaatcctgcaaggctgcggtgtgttagtgatgtacacagtaccccattcacacaacctatcttaatgccaaagaatgatagaaaagtgcctgtctgtgtcctcagacttgcatcagtagtggcctgctgagggcactagcagcgttcctccacccgaaccacccacacatcagggtctccgctttgcctgcctctcttctccgcagccgggggagctgtggctgctctgggaaggaagggcctgggtctctggaatctccttgcaacggctcccaggacccctttagaaggtcatgacctgtagtttcataaatactcctctgtttatatgagctcttgcccctcaacccccaacccaaatttagttcccagtatttttccagggcatacaaaatatggagcagagcttatttctgcatcccgtttcagactttcattttaggttttttttttttttttttttttgtctcttttgtggttatattagatgattttcagaggctctcagggaatcctgaatcatgtccttgttggggggaagggagattagttttgaaatagactgacagtgcccctctcagcactttaagtggtttcaagacaaaaccattgggaaagagcttgataccatttgaccaaggagaatggttagttgagtgccccaggtcaggatggggaccctgggtgtgtgtgggggggaatgtgtgtgtatgtcaagatttcttgaattcagcaccaactgattaatattcttctagaaattcagagaaatataaaaataaaaaggaaaaattttaaagctccacacccagttctctaaaaatattttgagggaatctttttatgccaattcccaaatggtgaaggacaagcaatggtgaataaaatatcagctgtaggggttccttagatcagaatatactttaaatactgcagcagcaactaagtaaatactgttcccacccctagcagtcagttgcacattttagatccatctggggtcaggtttgagttcctaaaagtcatattgcccaaatgtcagtgaaatttgagttcagtgggaccctagtgtcctgaaataggtttgtgcctttccatttgtgggtgcaaagtgtgggtgctgggagacccagattcaggatgttttcagttactactaacattgttgccaagtgggatgtctccttacccctgaagaggggacagatgatggctatatacagaccagcatgtgattttatgggtcttggttgtaggcacgctgttggagttcttttcttatcttagtgtaaactgattattgaatcatccatttcagagaattatttggtctggttttagataataagagtttccctggtagtgttttggatgacttcattgcttcatgaacagcccacaggggctgttctaagaatcagaaatgttgaaatggacctcactgacacgttagcaaaattggacagctgttagactagcatatcagttgccttgctcactttgctttttcgttcgttttaatgaaccccagaagtagggggtctaactaattcatattctgaaatctctatggtagaaatgccttgcatctatattatgaatcttgggaaattcaaaacaattttcataaggaatctttccataaagcaagtagggtttccccctcttcctgtaattcattttcataaagtaatctacagagtttgagacaatagatagtttttgcttatcaaagataacctttggagaacccagaagccttcactataacaaggtccagaaaagattgtccttgttattttctgctgataatgtgagcaaagacgttcttcccaagtgagagatagggaggtagtgtttccactcagaggctttgtgctccttagagttgtccttgactttgggcaaagttgtgttcagattccccagaaaaacactcagaagatctgctttgaatttctttataaaattgtatgtttgttgcattgcacaggtaactgcagaagacctagtatgaatagatgttgtagaacaggttagaccaattaactcttttccatttaggggaagaatcagcaatgtatgagggatggtgttacataagggatgtggcagatcagatttgcttgcattttctcacaccatcaggaataccgaatatccagcactgtttgaaaccagcatggttagaacaggaactcttggattaggcttcatggaccagtttgtggtcaaagtacgggtttcacgagaaactgcatgtgaaagtttttttagttctgagtcttcatctattaagttcttctgctgaaaggatgacatcttaagaccagcggtgtaatttgtagtttaattagatggatccattttgttaccattgttgctcttagaactttcttactcttttacgatggggttcttaatctgggttaatgggtgcctaacggggagttcatgggccctgcaatgaatgtaattccctgacattgtctgcaaaagtttgtgtgatatggatgttttttgtttggtttggtttggtaaggagagggtgcacacatgcattcagttctcaaatgttccatgactcccaaagatttacaaagaagccagtggtttcgagactggtcattgctgctcctttgagctgcatcccctttggttctaccagccttcacagcttgcatggtcccagtgttcaattccttattacttatcagcccatagacaaagctgttaacctgtatttttatgtgtaaatttgacataggattgatggtcaactctttaaactactgtttggatttccaagctggagatttctggatactctttgtatcatttcttcatgggatatttatttgctgtagtctgcctcagctcggcctttagaccatgagcactggagagtgtaaccacaaaaagcttcaggatattcttatatttgtaactgtagtctaccctgagctataattgatcctaaggaggattttctttttcttttcttttgtctttttttttttcccccaagcctgggagaaattgagcaacttagccaggaattctttgagatattgctgtgtgttctctctacatttctggaagcttttataccatggttcttttgttagctgttttggttgtcctttatcttcccttcagcaagatttactcaagcgggggaagcatagaaaagacaggttgctgagggattaggtgagcaggcacttgcaggactcattgtccctgccaaatgatcttttaaagaaactattgggtatttttctttgaatttcccaattgtagtgtgaattcttctttgccaaatggcttttggggctctgcctggaccctgtgtgccagagtcagagattcatcttggccagacactgccacatattgaagagggagctgtttccaggaaagctcagagagctgtggctcctagaaatcttcccttgattgtatgagccaggcctcagcacttttgaccatctggaaaattttggacctgagcaccaatatctgtctcatagatctttttcttctcatttcatgagcttttataaaaaattcttgttcatttgaaatacatacttactagtattttgtagtatatattttgaccgaaacttctgcatatctatgagctctaagaagaattgtatgcctgaggactgcaaagaaaatcttcagaagaagggttgatgcagcccctgcagatatacattactagtctttgcatcattatggtactcagtaaatagtcttgaataaataaatagagaaaccttttactgatacatgctattagtgaaagagtgttgctttgcagttttcaggtacactggaacaaatgatgatttcatccctccttcattctccatagtgtgtgtgtgtctctttgttcagtacagtttgaatctttgcttctgctatttctatagcatctcttcttctcagtggctatcaatctgtttatttctagatgcggacagcatctccaaagtgtgctgtgaggtagagtctttacaaccaaggagcacattactttgctgtagctgtacttgacatcactgttcatctagtactttgatttagtgctatgcttatgccagatataaaaatgatcctagctgtgtgcagaaatagctcatgacagttggagtattgcttatttttgtatttttttgcaaattagccagctaaattcctttgaacctttttttcccctttaggtaacatataaatatatgaatttgctgtgataagtcaatatttattgtgtgtgtttacttcccggccttttggctaagatcaagtgtattatcgtgtctatgttaagcacagttttttgtttgcttgtttttgaaacagagtctcactctgtagcccaggctggagtgcagtggcacgatctgggctcactgcaacctccacttcctgggttcaagcgattcttgtgtctcagccacctgagtatcaggtgcctgctactatgcccggctaatttatttttgtatttttagtagagacggggtttttccatgttggccaggctggtctcaaactcctggcctacagtccattttggaaattaagacatgcattctcaagctagtgaacaagatgatgcaagttattcatagaatatttttgtggcattgaaaagcagagaattaaaacattattttgacatttgctgagtgcttaccatgtgctaaagcctgggttttgaaagataatgaaagtttactgttttatttatcaatgacctgagagcatactatgataagtgacattggtcataagtggtccctacaaaaaaaggtagaagtatgttgagatcacagtgggctggcagccattgggaaaatgtgaaatagtccagcatttagtgctgtatccctgatggttgtatagacacagatcgtggatctagaccatgtcatcctcatgaggattctagctgagatgtactattattcccagtgcatcattcagtctgtgtctttctagcctaagtccttttttgtcctgtccctcccttattactttatggttatgtttgatgagttcactctgtttaaatatgtgattcttgggtcttgcctccccgctctgtatggaaagccagtatgagacagactgtatgaaagtatctagtcaatatttccttatatatccctttgttctcctatgttcatgttgccctgggctcatgtgtgccaagaggactttgttgagtccatggtttgcagctccattcacaggtgctttttggtgatgttaatgacaacagtgatgacctgcaatagtccttgatctgctgtcaaaattggttacagtttttgtatccatcccatggttttcttccctgttttttttttttttttttttttgacaggggctgtatacaatcactctttattctgtgtgtcctctgtgcttcatttctttggaaaagcccttcaagctaaaagctgagacaatgaaagccctggcagcctcccttggcagccgctttttctcagctttcggcacttttctttggcagaacccatttcactttatagaggttggagcttacctggaggagaagaaagtcatttctctggagatccagagggatgaccccaccccagggggattttgttttccaagtttcaccttagtcatttgacctaaagcttaaagcaggcctaagggaaggtaacttttgttccacctttgctgacttttagaaagaaaaaatgtgttctgtttatttgttctttggcagggagctaaatcatgctttggttgagattagtgtggttgactaatatgaaatagccattttgtagtaaaaaatggtcaaatattggcaatatcatctggttcaacttaatgtatcttattcatagaatctgagctacattatagcttgtttctgttgatagtgagttgcaaaaaaagtattccagaggctgctctgagtgattttcatggaaagccagggctaagatttctgccctctttctgttgcttcctaggtcacacttcacctgaatcccatctcctcagtccacatccaccacaagtctgttgtgttcctgctcaactccccacaccccctggtgtggcatctgaagacagagagacttgccactggggtctccagactgtttttggtaagtgcttaaacctcccccaaactgatccttagcacaaggacataatggtccttaaactttgccaaacttttcataaaggcttactttcactgaaataatgccagagtccaaagagtgttaaatttggaggatgcacttagtgatatttggatgatgacatagataagcattcacagaaagcagacacacccgcccatcttctgtgggcagaggctggggtctagtgcgcacattagagcaggacctgtcgtcatactctgtgtggcctgagctttggtttcagctctgaaaccccccttgtggcatcaggagccctgtaaatattgtaactggctaccgggtgtgtggtccctgaccacaaaatgaatatgcacggacccatactatttgtatataacacaggcctaattcctgatatgaggatctgtttgttgagaaagtgacacagtgagctccaaaatgaagtcatttgtattttattaaaaaaacaagctggaactcagctcttgtcgaaagatccaaatattacctactatttgtaaatcatgtccctttgagtttgccagaacattcaagtgtgctagttgtggagaaatcgatgggttgtttggatggaatttttttggtgtgatatcatgtctgatgatgagcagcactgcaacttggtagttgtaactcacattgtctattacgagagctgcaggctaatgtcctaactgcggtgcctgaggccttaaacctctcttgcccacaagcatccaaaacaagtggagtccccagttaatagttttcctcttgcctcatgaataaactttgcccagttaatgtctctcaatccagatctgtagtttctttcccctgtgtttgaagagtacttctaaaaactcaaaggttcttgttgaataatgtaagaatccatagtcaatacaattattataataagtacataaatgaataaaagggagaaaaggaaaagctcatctttatagtaaaatgccaactagaaaatctagaaggagcaaaggagttagaaaatgatcattttgcaaccatcataataaaagttgaccaggcaagaattatcaacagatgctaaatctagcagagatggagggagttcaggaagtagtatatttagatattcttaaaatatctttcatacaaattacttattaattacacataaaaaatagtgactatataccttggggatatcccatgataccttaaccaggtgattaaaattcatatcagcaatgtggggcagatggacgctgtgtgcctataaatgagagagaacacagcatcacttttgtggtatttttgccagaaatgcatataacctgaatctaatcatgaagaaacgctgacaaaaccaaattgaacgacattctataagataactggcctataatcttcaaaagtatcagtcatgaaagacagagaaaggctggggagccattccagattagaggagacaaaaagacaagacacatgtgatcctgagctggatcctgttgggtagggagtggggcagctgctataaaagacattagggggacagtggattgtattttatataaataaattataattgagcctatagattaaaatattatatcaatgttatattccttgaatttgataattatgttgtttttatgtaagagaatatccttaggaaacatacttaatactctttaagattaagggctaaaaggtcagatcattcaggaaaaaaacatgttgtatagagaagaataaagcaaatgtggcaaggttttaaaaactgatgaatctagttaaaagggtatagtagagtcctttgtactagcaactttgctgtaaatttaaattaatttcaaaagaaaacatttaaactcaaaaggtatatttacaaggtgggcattacaataactttattgtagccttttctgggaattgcaactcttattctatattaaaaaggccaaaaatcaaaaatcagtaattatttagttgttattactagcacatttatttagcacttaggatatttcaggtcactaaatgctctaatactttaattctcacgatagccttctacagtaccatagtgtagatcctttcttatagatgaagaactaagatttagagaagttaagtagtgggccaaatcacatggctagttacttgcagagttggtactcaaacctagatgggacccattctacaagctgttatgctaaactgtctgccttcgtactcataatcactgtcagtctcctctaattaaagttacttgtgatagtaatactaatggctctgatcataaagtcatatgcacatttagccctcatactgtagagctatactgtccaatactataggaaatagctgtgcgtggctacttaaattacagttcttcagtcctgcttagccacatttcaggtgcttagtagctatgtgaggctagtggctaccacagtgggcaggttatggaggcattatgagcaaaggcagtgcatgtcctggtttagatccaagcagtgaccttgggcaaattaatttctctaagccggatttttctcaggccctgcatcatagggctgttatcttgagtaagtgagatcacatataaaatgtttatagacatcacctgctgttgctgctcttatttatttctagtcacagtaaagagcatgtgggacgggtgttgaatttgcatctgtatttatgaaatatctagtttggctggccccagatcaaaaggggttctgtttctctgggctataggtccagatgaaagtgtgggctacgtatgtcatagttgtacttatcgctgcctggattctttcttcagtctgccagttcatgggttttgacggaaagtgtcttactcttagttattaatttgctttaattttgcttaaaatctgtaaaaactgcttcttggtcatcagtttagacactaacaatgaaagaaggtggccgctttagtaaacaattgaacgtcagccccatttggatcaatcccatgtaaggagattgcagatcaagtaatgagcctaaaattaccaacacgtgggaggcagcatcaggagaagtcaaggatttaaattccaggacacctgaactctgctttgttgtccagcaggcttcctttagggaaaacggtttttttcccgtctgcacatttcttcttggcctggaagagacgatggaacatctgttgttcattcacgttctcacatcagcagacaacgagtgatgcaagtccttgcacaagctgggccactctccttgggcaggcttttcccttcctctctgtggcctgaaatgaattttagtttctcctcatctccttgatagcctttgccacagagggtctggtgatcaatagaaatccagtagtgtgttctctttatccatttgtatagttaagagttaaagtttggggataagataactaaattattttatataaagtgttcatcaaacacttcagagggcccacgggatctctggaaattcaggcttcaccgttttcatcactgtcttctccgaggttacccagggagcctaaaggagctgtggaaagcgaatgggtctcttgactctcagtccacgatgcatgtatccttgcctgtttcctgatatgctgctggatggtttgcatttctgtctcagagctgtctactgtgtacgtagagttacagaacttttaactgtttttttttaaatagggcaatgagaaaagttcaagtaatagcatctactcatttatcagggtgacctttttatttaaatggacatgtctgtgttgttatgactgcccaaattaaaaaaggaaaactttcataattagttaggagggccttatgttacccaggacatcgcagccacccttgagggtgactgaaaacatactttaatactagtaataaaggcatctgtctttttctgtcaaatcatttcagtccttctcaccccctcacagcacaggcaagaagggaacgtgtcaggcagggagaaagtgggatttggttttctctgcaggtgcagctcctttatctggttattctggttacctaggaaatatgagtgggatgaagagtgatgctttcaggctgagtttcaagtagtgaatctttgagtgtgagtcacacacacacgtgatgaagttgtaataatcttatagttttccttttgcagggtgtatgggtggcccagagaacaatcagaaataaaaatcatcttaccctctcagtgtgccatgttgaaactgcaaataatctcttagaaggatcacataagcctgtttttatttatgcattcatttctacactgaaaaaaaaagtaagataacttaactgggtgatgatgcctgaaccttcaacctgaatttgctaaaatgagagccacagtatgaagttgtctttaaggacatactacaatttaaatacacggtttctagagaaaagacacaaatggccaaaaaacacatgaaaagatgctcaatatcatgagtcattagggacatgctaatgaaaaccacagtgagatgccacttcacactaggatggctttaataaaaaaggcgataacaagggttgtgaaagctgtagggaaattggaacacgcatacattgctggtgggaatgtaaaatggttctgtggaaaactgagcaaaacacatgtccccaagaacttgtccacaaatgtccaaagcatcattattcacagtaaccaaaaagtggaaacaacccaaatgtctaccaacagatgagtggatgaaaacagtgctatatccatataatggaatattagccataaaaaggattgaagttctgatacataccacaacatagatgggtcttgaaaacattatactaagtgaaagaagccagatgctaattgtcacaagttgtatgattccaatttatataaaatgtccagaatgggcaaatctatagaaacagaaagtagattagtaattgccaggggctgatgggaggggaaaatggggaatgactactaatgatacgagatttcttttgggaggtgacaaaaatgttctataattacatagtggtgaatataccacaccttgtgaatacacacagaaacactgaattgtacagtttaaaaggctgaatattatggtatgtggactgtatttcataaaactagtaaaaacttgctgcagcacttttttttttttttttttttttttttttgaggacagagtctcactcccttactcaggctggagtgcagtggtgcaaacatgcctcactgtagcctcaaccttctgggctcaagcgatcctcctgcctcagcctcccgagtagctgggactacaggtgcatgccaacatgaccagctgattttttttggtattttttgtagagatagggttttgccatattgtccaggctaatctcaaactcctggtctcaagtgatgcacccactttggcctcccaaagtgctgggtttataggcgcgagccacagtgctgggcagggactaggtttttaaatgtatctttttactttattccatgtacctgatttttttttctttttttctttttttttttgagagagggtctggctctgtagcccaagctagagttcagtggcatgatctcggctcactgtaacctctgctgcctgggctcaaaccatcctctcacctcagcctcccgagtagctgggattacaggcatgtacccccacacccagctaatttttgacttttttttttgtaaagatggggtttcactttgttgcccaggctggtcttaaactcttgggctgaagccgtccacctgccttggcctcccaaagtactgggattacaggtgtgagccactatgcccggcctctaattttttttttttaatcttgctttatttgtattccaaacttgagcattctctcctgcaaggtctgtagacttggagccctaggacaagcagacgttttcaagatgagaccctagtgcctggcttttaataacctaaaatacctagtccagaggccttggccagcttacttatgtcaggcttagtcactttgcatgctcataaggaaaaaagggtatctaagattagaagtttcaagaaataagcagcttcttccaacctcattcactctcgatattactgtgctgtgatctatttttttctagccatttatcattaaaatcagagagcaaatgtatgtgaatgtgtgtatgtttgagtgggggatggggcatagaaggggattttggtctttgaggtacaattgctggagctggcatataaaaatagaggatgcccaattaaagttgaatttcagataaataacaaatcattttgttagtgtgcccatgtagtatatgggacataacatatactgaaaaagtattcattgtttacctgaaattcaactttaactgggtgtcctgtactttattgggcagctctactcggaggtaattcaggtttttgtttccagttaacaccctggcctgggtgttaggaggcctgagtactagtcttggctctgccactaactagttatatacatcatcgggaaaaaaaatcacttaactactcagacctcgtttcctcatttctaaaatgaggggatcgtactagctcatctctaaagttcctcccagcttttaaactctgtgattctttgatagtacgactgctagatgttatatcccaatttaatttggaacagaaactggcaaattgagcattgcctcttcagcaaatccaagtaaatatcaaggcagggcagttgcaataaatgacagaaactaaactctatgctattagctttggattaaaaacaaatcaaaacttaatcctaatgaaaaatgtaaattaataaatttaaaaccagttttgtattttcaagaagcggggagggatgggtgaagaagctggagctgccaacatctagtttattccttttacttaaactagaggcattaaaaaaaaaaaggtccaaatattttgggcctctgccaccaaaccacaggcagttctctggtctgcactggagtttggatgactgacaagactcagtgaaaaacaagtgctatttgttttcctgtgcctagtatttaactggaaatcagaaggctaaatttccaatcagttgctaaatagccccagatgtgtgctcagtgcagcactaggaagggacacgcacagcccataccaccgtgcatgtccagctgttaccttttcatgaagccaagtgatgtgtaactgagggttgtagtgtctgtccaaaaacgccctaagaataactcagacattcaagtttgcttgtggagaagggaactttttttaaaaaaaattctgtattctattgtgttacatttaaaaatctggaaataatttttttctttgctaatttccttctttcccttctttggcagttcccccacccccatgtttagaaaaaaacacagaattagcataccgggtatgatggtttatgtatgtgcttgttcattcatccaacacacagtttttagtgcctgactgtgaactgtgctagctgtggaggatctagggaaaactggggtgaattgcctgtcgtcagggagcttcccattgtgtgggagagctgattgaaaaattgggaattgcagtttagtgtgctaagtactattacgctaaataatagtgaaaattggagaagatgagaatagtagaaattggagaaaatgagaattctcttcttccaaatgcaatcaaggcagcttcctgcatgaggttggctctggagaacagcatgtggcaaatgggtcaaggttgcagacacaaacacagctcttggctcggccagaagcattacccctgtattccagggacccggatataccagtttgtgttttgcagtgaggtctttccccagataaattctctcttgaagggagattaaataactaaatgtttcaagattgctggtggttcttcttctttttttaaatgtctcttgtggaatgactcattgtgtcctgtgggatattccaagtggttgtgtaccatgcatttttattccggagtctgctcatctgttggttttgtggcttgtccttaagggccttaattatatgggtcttgatcctctcatgaactagggtcagtcaactaccctagttcaaacaagtcattcctgtttcctaggaataggagtttttggccctattgtggccattgagctcttcctaaatgtcactatggcaattagaacattggaaagagcccagtttcaactggtaaacctggtccagaaggggtttttgaaagactccctgggatttattctaacttgctaggttaaggctggtgaatgttgtgagtgagtgaatggcccgtggcccctgggagatttgcctgggtgtatttttcctgaggaagacctactgtccaggagggttcacgcaagtgtagacttttcctggctctggctggacttgcgtcatgtctgtgtgcaggcatgggttgcagccctgtgaaggctttgctttcattcaacaaattgaggtcaaataaactcactttcactgaggaggcaaggttggtgtttcttcgtgtggagtcccataacgtcttttaaggctttattgtctaaggctaatctggtaatcagatgcatctgcccttcccaagtgttgggcaattgtatcaaatgtcacatctctggtgccctttgttgacgtggtggccagcctccagagagctgttcggtagaaaaagtgactgttttgttaaggaaggttgcagaatattttatttccatgtaataggaggggaaagaaaccccaactgtctaccaggagactctgggaggctgacttgaaggctgtggctgtgccttgttccgctcataaattatagacagtgatgcctttggtaagggttctccacaggtgacctacactctccatctcagaaagcaactccaggatggtccaactccttcctggacacaggttgttgggtttatttgaggcaaattggttcttgcacctcgagtccacattatctaactctagcttggaagctacttctgatttcgcaggggaggaaggagtccctttagccttctaatttctgtgtctaggatagaatttgcttttctcaagatctgcttttgccttttgttcctaacactgtatccttagatgacccagggtctttgttgcaactgtgggtccttaatgccactgtgctagggagtcaccattggtttgcctctgccttgtcccactgaggtggtgaatgacacagtgtatacctggaagtcagggggtcatccgtctgccacctctagcaaaagtctcacagtccatttgatctctggcctttccatctttatcacagagagcctgttcttgagattctattggttctgggtgatacagatggcagagtgatgttcagagctgctgtttggagccaagcctgccccaatccattaaaacagggtttttatatccttttcttgcagtttgtataagaaggctatggtcctgccgtagtgaggaatgactcgtggcctgtcaacctcagcatctgtcagacaaatctcatggcccaatgtgaggatacatacacacatatgtgtatgtttaacaagcacttctagtgtgtgccgtgtgtgaggtactcttctgagtacttacatgtatgagcttagtcttcataataagcctgtgaagtaggtgcttttgttgtctttgttttaagatgaggaaactgagacaaagaggttaacatgtacctggtcccatagctagtaaacgggggctctaacccagggacagtgcttagtaagtactcagtaaatgttagcaataataataataataataataataatactttccagaatggtaaatggggacctcattgggaacagtcacactgctgactcgagggcatgactatgattttatctctaactctggcctccagtctggagccactcatgactgttccaagaacagggcttcagaattgaacctatagagccaaatcagggcatcgcatcaggtgagcaaacttcttgtttcagcaaagtgttttatgcatgacttatttcagtactgggatctagatcatatcagtatttcacttgaataaagattttaaaactgtttcttgacccctttcccaagagctttccctctggggtcccagttggagcgtttctggatcagctccaccaggatgccctaatatctacatctatcctgaaccctgtggggaccgtttgttaattgatgctaaatatgtgcagttcaaccttctttgctttgacctaggagaccaccttgatcatcttcagagacttcaatgtagactgcaaaatgggtgtggcctgcttaagagggctctgcctttgcttcagagctaattttaggaagctcaaggaggctccaaccacagttatttcgggctagaggcctcacctccattcttgccctccaaggaaataccctttagaactttttttcccaaactgttgttaggtctgtggttcctgggccagaatatgcagctctgtttctcctagggcttgcaccagccattcccaggagctatcagtcagcatttatctagagaaacagaaccagtcggggatatatatatgaagagatttattacaaagaattggcttatgccattgtggggacaggcagggcaatcaaagtccgcagggaggccttcaggaagggcagctcaggcatgagcggaagccgctgtccacaggtggaattttttcttcctcagggaagccttgggtgtgctcttaatggctttcaatggattgaatcaggcccacccagattatctgatacaatctcccttccttagtgccacctgattatggagtttaattgcgtctacaaaatacctcacagtaacgtgtagatgagtgtttgattgcatagctggggaagatggcctagatacgttgacatataaaactgaccatcacagaaatttttaagatccttgagcaatttgttgttgtttactctaacttgacttctagccaagtaattatttcgttgctttaactgtttcatttctatttctgtctgtcccttccattccgttcctctccactctgaccagcacagctcctgagattgctggggaagaggggacagagagggaaataacccaccaggagaatctctgcaagcagcagtgaagggtgggagccccctgctttgcctcactgcttttccttttcactctcctctaagcctggagaatgttcctctgtatttgcctacccagacttggtagaaagcttgccctaagacacccaggtctttgctgacctgtgagccagtcagttccctcaccaacgggagatgacctttccaggcagagtgtccaccttcccacagtggaaagagcatcatttttggagtccagcagacagtttgaatctgcactcatttcttgctaaaggtgtgtaatctggcactttatctaattgctcagagccccagttgtttccactatcagatatgaggattcagaatccatgtgacatgcacttaggaagtgtgcagcctgagcttttgtgattaatatcatatttcctagtgttttattaacatgaggctgagggatgtgcgtgtctaccctacactactgatttctgagcctggtagctgactcttccacagcgatggaatagaaagagctctagagtgagaaaccaggtctttggttctattgtcaaccctgttgtctgccagctgtgtgccttgggtagatcctttagcttctgtcagcttcaatttccttctctgtaaaatggagttgagattatcagccttgatgaaaaaaaaaactctataaagagaattctaggaacatgtttggagccaggcatttgtaaaaatcagtttttgctcttgaacttgacttggctgattggatgtaacttagaagaaaaaaaaagagagtcttccctcctgtggggttctccaggagcacatttggaggacaaaattagataaaggaatatggcaagtaatagtaatgataccaacattttattttttttcgtgaaaaacatcatttagattgaaatgcactttgaatttgggggtaagctcttccatcaggctaacattggcagatgaggaagggtaaagttaggagtctgaagaattttttgtaaagctggacaggattcctgtgtggcctgggactctactttggaaaactatattagaaagcagcttgtgcttcatcagtttggtaacttgtggggacttagtttgttttttagatggaaagacatcttttgcttctctttgtgtatatacacactcacatgtactgttgttctgataacgtttccatgggagatgagagtattgcttttgtactggctcatgttcaagtttgtgcatgtttgtgtttggagggcagcatctcagagctttcctcttggacgtgtgtaaacatgcagggtgttaagaacatggggcggtttcagtcatttaggttttttttatatttcagcaaaaattaagaacaggatgatcatcatgaatgttttgagaaaaagtaatagtcaaatatgttttaagtcattttattggaagaaagtaatctggtttggggtactaaataaaatcacccaagaatttttaaatggctgcatggatttgtgtttcatgaatgcatgattggcagataccatcatcacatggctcatgaatatgtagctttgcaaattatgaacctaggttcacaggcatggaagttattatttctttgaaatgaagcttttttaaaaggcattgagtcatgatatatgttaatagaaaacatgtttcggattgcatttcacatcacatggcttcagaggaaataggcaagtggggtcctcccaggaattgggtagggagaacgtgtgattttcctcttttaaaatgcagggttcagtcttcatttggaaggtaaatatttcagtgctgttccagtatgtttgtttttgctggactttgtgtgtccaaaatacataaaagcataatctttgtaatgcctttctgtgtgggggctgtgatgagttctagggccaatctgtagatcccacttaaacctcaactgagattcttgaggaatacctattctcctttaccgtgtgtcttttccccctggaactgagccagcaagttcttggcatggcaggtgtttctgaaatatcagtgtgtttttctttgctttctttgttttccttgttttgctctttctattttcctaagcaggcaactccaaaaagagatttgtttgtgcaggagtcaggaaaagggaagaggaatactgaaagctgggagtagggcaggacagaagagggggaggagtctattttcattgtgtaagtgttgaacttccaccaatgccaaagtcacggacatgtgtgcagttggatgtgcgagttagagcagccccaagggcctgtaacctgaatagcaggcactcacccagctgataactcaagttccaaatggaccacagctgagttgtaggggatgtgtgtgtgtgtgtgtacgcgtgcgtttgagattcctggaacagatttcctctgagatctcaacaggctttttcattatcattggggagctatggtttctcttatttcacaaggcccatttcttccttttgagatgtgcaaggagatgactccatccatgacttggctttacactctccctcttggctttttatcatcagtgcagaggagagattcttgctcgttcttcaaacaatctcattcgagctttataaagattattggagtttaaataatattcatatctatggcctagaacaatgttcctcaagtatgcgtcagaatcatgagtggtagagggaggattataatgtagtttcctacatttctacctcccaccaccctggagtctgcattttaacgtacttctgtctgaggatcagactttgggaagcgttgggcttgagatgttttcttgacattgatttatgttgagaccagaccaagaagcagatggatggacatgatcagttcataaacatgttcctttcttagggtcaaattggaggaggctctagagaagcactgtccaatagaaatataatgccaacaatatatgtaattttaagtcttctattggtgcatttaaaaagtaaaagaaggctgagtggctgggcatggctcctcgtgcctgtaatcccagcactttgggaggccggggtgggcagatcacctgaggtcaggagttcgagaccagcctgcccaacatggtgaaaccccatatctactaaaaatacaaaaaattaaccgggcatggtggcaggtgcctgtaatcccagctactcgggaggctgaggcaggagaatcgcttgaacctgggaggcagagactgcagtgagctgagatcgtgccactacactccagcctgggtgatgagcgaaactccgtctcaaaaaaaaaaaaaaaaagtaagtaaaattaatattaatgacactttgtttaacccagtagatccaaaataatatcacttaaacttgtaatcagtcaataaaaattaatgagatagggatttttcttgtgctaagtggtatgcattttacatttatataacacaggtcaatttaaccagcaacatttcaggttcaggtacttgatggtgccatgtggccagtggacactacattggataacagctgtagagcaatgatgccttcgctaaccccctggcagacacgtggttgctcatggcatttgttcccatttctccactgctcctgaatatgacctcagaatccttctcggcacagaaccttaggcaggcactgccagttaattggacatcaagatttgttttatttatcaaacaaatacttaacaagtatcttttttgtacccaacacttggggtatacccatggacaatgcacactaagatcccagcctctgaaggaaccttctagtggaaggagttgggcaataagcatattatatggcattttagaaggtgacaagtactgtagaaataaaatgtaaagtgagtttgggaaaatcagaattcctagagtggggctgggtggtggggttgtaaatttaaatgggcccattgagaaggtaacatttgaatagacttgaaggaggttgaggtgaaacttaagatgagacttaatatccacttttgatctagggtggcctgaagtttcctcaagacttcatctgggagcattctttttggggtaggggtcaaggaggcaggaggatggggatgtgtggcactatccacagcaagttcctctcctcaccactgaagactaaaccaacgttggggaggcccagagagaggctacaatgcaacctgccaggtggtgagtcagctgatgtgctaagtgctaaagcaaagaacctcagtgccaggaaaatggtgtctgtgctcattagctgggacttgtacacttcactcaggcttgggagatcaaccttgaggcttccgtggatccgctgaggactttaagagttaaagcttaaagacaggtgtggaaacaaagggctggttgcctctttggcttttttcatgtagttttggatgaggttgttgaacctgatccagaaaaaataataaacttggctgtggttgcctagccgtaagttcttataataaaactcccagcaattggcagatagagtaatgttctgctctttaaaaaagtctggtagcataacctgaatttcaaatacaaatgttgtgcatggttcaagtagggaggagcattcaggagagtccagggtgcacctcagcatcccaggatttgtttgactgtaaagtgcttcatggttccccttcaacaaacgtttactaggaattgggacccttggagcccagtgctctgttcattcccacaggaagacatttgtcatgtcagggaatgttagaggattgggttttaattagcaagcaggaggaaagttcattgggttgtggggaagacatggaattactaaatatgctttaataattggtttttaggtggagttattaggtgaaaaatcaaatcattagctttaaagcttggccaaaagctcatttcctgggcagtaagggaagcaatgagtttgggtaatgggaatgaatcaattatggtgtatcttttcctgtaggtaacaacattgagctttcattcaacaagcaattattgggtccttgcttcatgcccagcactatgccaggcccaagggattcagaatgaacaaggttttttcttggccctcgaggtgttgctctttgtcaaatgagggtggcaggtatgctgataaatagttgcagtccatgtgagagagggatggactaaaggtctgtacagtcacttgtgtgcagctcattgtgaggagagtagggagcctgggaggcttcacagagcaggtgatactcctgggaggacacagaacggtttgccatgggagcaaggtaggatagacgggttcaggcagggtgcagggtgtaaaaagacccaggagtgtgtggcagcatgatgtgttctacaactgtgagtagttcttgggtatgtgggagggtggcatgagatgagggcgggcagaggcacttcagtcatgcgccatgttaagatgcttaggtgccattccgctttatcatgtgtttactttttagaaggattacccaggtgacagtgtggaggaggggtagaaggaacaggaatagcggctgggagggtagaaagttactgcaacagtttggttgagattataaggacccaaaatgggacagtgttgtggcaagcctccagggataaggtggaagatggggcatggaataaatagtctcctcctctggcacacagctcctccaaccctcatcatctctgaagtgttaagtacctttttgtatgctggtgagatgactggtggctggggctcctggatagcctctggatgggggctggttgccaagggaaccaaccatgtgattagaggttagaactttcagcccacccctctgaaggaggggagaagggctggagattgacttaatcatacatgaccaatggttttatcagtcatgcctgtggaatgaaggctccctagaaatccctgatctgtggggtagggtttggagagctgctggttggtgagcatgtggaggtgccggggcgtgggggagtggcgctctccgagagggcacagaagctcctcaccccttccccgtaccttgccctgtgcatctcttccatctggctgctgttcttgagttgtatcctttatcataaatgaataaacttaaaagtatttccttgagttctgtgagccattctagaaaataattgaacctcagggtcatgggaacctatgatttatagccccactatcagaagcatctgaagaggggcagtcttgtgggactgagcccttaatctgtgcggtctgacctatctccaggtagatggtatcagaattacatcgaaatacacagcatcaattggtgttctgagttggagaattagttggtgtgggaaaaacacccagacatgcgatgtcagaagtaaactattgagagtggtgtgagcatagagaaaaataggttgtttttctcctatacactcttgcagttatcttccttgcagtgatgattgcaaccctttctcatattagacaaaattattttccctacatttcttatgtgttttgctattctctttatatcctatgttcttctacaagccagactctgataagggtgctatgccatgaaaattaatgcagtgtctggagcatggactggtagactagaggaatgacctggaaatatcttgtcttcatttcagcaaatgatatgatttgggtctatgtccctgcccaaatctcatgttaaatagtaatcctgtgaccgggcacagtggctcaggcctataatcccagcactttggaaggctgaggcaggtggatcacctgaggtcaggagttcaagaccagcctggacaacctggtgaaaccctgtctctactaaaaatacaaaaattagccgggcctgatggtggacgcctgtaatcccagctacttgggaggctgaggcaggagaatcaattgaacccgtgaggtggaggttgcaatgagccaagatcatgccattgcactccagcctgggcgacagagcgagactccatctaaaaaaaaaaaaaaattgtaatcccagctgggtgtggtggcttacacctgtaatcccagcactttgggaggccgaggtgggtggatcacctgaggtcaggagtttgagaccagccttgccaacatggtgaaacccgtctttactaataatacaaaaattagccggatgtggtggcacacgcctgtaatcccagctactcgggaggctaaggcagaataatctcttgaacctgggaggtggaggttgcagtgagccgagatcgcaccattgcacttcagcctgggtgacaagagcaagactccatctcaaaaaataataaataaaataaaataaattgtaatccccagtgttggaagtggggcctggtagtaggaggtgattagatcatggggatgggaagatttcctcttttgtgctgttctcgtcatagtgagtgatttaccacgagatctggttatttaaaagtatgtagcacctacccactccctctcttcctcctgctcctgccatataagtcacgcctgcttcctcttcaccttccaccatgattgtaagtttcctgaggcctcccagccatgcttcctgtacagcctgtggaaccatgagccaattaaacctcttttctttgtaaattacccagtcccaggtatttttttatagcagtgtgagaatggactaatgcagcagggttcttggcgggttgtagcatgatgcccttacaaagatgaggaaggttctgtgaggtcccttggtagttggctgaacaacctggaaccccagcaaggactgctaatgtgctcaggttagtgtgggagtgtacgtatgagtcacagacttcagccttgtcttggtcaacctctcagggatttagatgaaagtgcagaaggtgtgctataaaatttaattatttatagctaataaaataaggatttttacatggtctcttcagacttgaaatatgggtctgaagaataactataagactttgcatttattttgggagaattatgggtataaggataggatagaaaagcctcgaactggtgaaaagaccttggggggttaggtaccatcatctctaccatccttcctggtgtgagtgaccactgtttctcacctgaattattccggaagtctactaatgatctcctgctttttgtctccccttagactcaacatagcagccagagccatcctgcgaaaacatttggtagatgtttcaatagtccttacaacggtctacaaggtcctgttgggcctactggtctcctctgggacctgtgtcctaccaaccttgcctcagccctgtgtcctaccaacctcctctcagccctgtgtccagccacactgacctccttggtcttccttcaccatgtcagaccttacacttgctgcgtctcaactgtgaatgctccttgccctgatgtttgtgtggtttgttctttcgtctcctttaggtctttaacttctcagtgaccttattgtgctcctctggctgtcttattagactttaatctccataagggcagggaattttttctgtcatattctccactgtgtctctccactgtgtctccagcatggagaacaatggagtaggcaggcactccataaatctttgttggctctatgtttaaagcatagattagtttattaggctgttcttgcattgctaaaaagaaatacttgagactgggcaatttataagaaaagaggtttaattggctcatggttctgcaagctgtacaggaagcatagcaccaacatctgcttctggggagacctcaggatgcttttacttatggaggaagatgaagcaggtgcaggcacttacacatggcaaaagcaggagcaagagagagaacgtgtgtcgggggaggtgccacacacttttaaatgagcagatctcacgtgaactcaagacgagagttcacttattaccaaggggatggcctaagccattcatggggggatctgcccccatgatccaaacacctcccaccaggccccatgtgaaacgttgggggttaccattcaacatgagatttaggtggggacaaatatgcaaactatatcaattagtaaatatgagatcatagcagggttcagctgatgccaaagctaatgtggatgcttcatgcagtgttcacatatatagagaaagagatttattataggaattgtctcatgcaattatagaggctaagaagtccaaaatctgcagagccagtgccccagttccagttcgaaggcctgtaggctgctgtagcaccgggaagagctgatgttccagtttgaaagccatcaggtagaattcttacttgtgagagagtcagctttttgttctattcaggccttcaactgattggatgaacccatacatgtcagggagagaaatctgccctactcaatgtactaacatttaaatctcatccaaatgcatcctcaccaaaatacccagaataatgtttggccaaatatctgggcacctgtggcccagtcaagttgacacataaaatgaaccatcacagtatgcttctcagaccatacctggagaccttgaatcttgtcccgacaccgtctttcagagactatcctgttgacgctctgacaaccagggtatctggggcagaactgaagaagctaggggtgttgccctgaaaaagcaaacatgtgattgaggtcagatgacacctttaaacacctgaagtcttgtctcatggaagaaagacgaaggaattctttgttctagtaggcatggctcagactagtgtataaaaaatgaatctaacagaacagaaatctgctgtcttgggagctagtgaggtcttctttctggaagggtgcaagcagaggccagctgtgaccaggagtcagaagtcttaagttctggtctgggcctggtgcatgactctctggccttgggtaggccattagactctctgaggtttccgcttttctgctgtagaggtcaccgtagcctgcctcacagttccgcaaatcagatggaaataacatctgaacaataccttctaaaacaacaccttctaaaactcagctgtagccttgtcagggtcaggagagctggcagtcaggaggggagtgctagctcactccttgctgaagctgaaaatttccactgacctgcagtcagggacacctcactgcagctttgctttcttcttattggaatgtgcctgaggagtggcagttaactccagttccaaattcctcagccctgagtgtatgaagcttattgctgctggcccgtgaggacaacaatgcctggagggagcagagggagttgttcctcctccacgaatcagccccatcaccagcttcatcacggcatcgctctttaattacttcaggacacaattcggagttgccgttgatatcttctgtatttgtgctgtttgctttcttgcctctggaatgcaccagtgtgacatcccgctttccgctctgaaaaatgtactctgtgtataatgtatatagggttgctctagtttatggccacaacatgaatgagaaacaagaagcagaacatccagggtttctcgtctaaacattcagaactgtgctggcagtgggacaaaggcctctggactgttgtgggttttggtgacagccttgataaaaatgcctttttagtacaagtgaaaggaagattttactacagtgcaaaagtcaaaaaattagataaacattgttggaagttcagtgttgatgagtagctaagcctcagagaagttacacttaggtgggcatggttattttttggcaggaaaatgacctaggatttttttcttattcaggcgacgtcaaaacaaggttagagctacatgttcccctctggttttgtttataactggcatcaggacattcagaaatgatcgtgactacacttgacagcactgatacgtagtaagtgtgcagtcagtggtagctgttgtgagtagaaatggtttacaccgagtttattannnnnnnnnnnnnnnnnnnngtttacaccgagtttattagtgattaattcagggcttccacagagccctgtgtagttctacacagctaccactgactgcacacttactacgtatcagtgctgtcaagtgtagtcacgatcatttctgaatgtcctgatgccagttataaacaaaaccagagtggaacatgtagctctgtaccatctgtgtggcccgggcatcaggatatctagaaacttttcaggtgattctagttttcagcttgcaacattagtaggtcatggaatcaattaattgaagtacttttttttgccagcgtttttagaagatacgtttatataattgtatagaaaatattaatgcctagcacagtagctgggaaaatataattttgtgtgtgttaaaaatgctgctgtgatagaaccactaataaaatccctgccctcgacttgcttcttagtcttacttcagaaactgcatgcttttcgttatgaataaatggttcatgtgaaatttaatacaagacatttatagttctatgacctgagaatttgtgagccttcttgcccacattttgaggtttcactctgacattgaaaaaatcagttattttataaatgctagccaacaaaaatggcatgcatattttcaccagcaactaaatttgattatagcacagcaacaagatgatgattttcctcctttggatgtgttaattacacatataccatgatatgctaggtcagcagtggtctaaatacattcagcaagaatgaggtacttgcatacgtcatcctgaaagttttattagatcagtttaacagcctcttgacttcattatctatgggaatttgggggtcttacacaataaactgttacaaacattcatctcactcttatgaaatagagcaatgtgatagaaaggctggcaacctttggccatttttatctcagtgctgaggtgaacataaaccaagaggactctcgctgtttccctattgtgatgactctgttggcagatgctgcaactgtggaagacctgaaagtcgtgatcagttgctagcaggactttgggatcacttgtcttgatcctgaagctttttataagcccacgagaacattcatcaaggcttcccacttgacttgaaatacattcattgtaagattggtcttcaatttagatttcttggaaatagcagtgataattcttacgattactcaatgtgcaatgcagtccgtcctcacaaggttctttcagagttcagagggacatcctgcattggtagttttgcctttgtctgggaggactaggcttgggattattccttgaatccgctgcttaaaaacgctgatctgcttgtataacaaagggaagaggttcgatttacaagcacttcgatttgagaagtactttctctaattatgattcagctccggtgactgcaccatgttaaatacgcaattctctttcctctaggtgtctgagggttctgtggtccagttttcatcagcaaacttctccttgacagcagaaacagaagaaaggaacttcccccatggaaatgaacatctgttaaattgggcccgaaaagagtatggagcagttacttcattcaccgaactcaagatagcaagaaacatttatattaaagtgggggaaggtaaattttatgtggcttcagttaatgactgatttatgacaggcaattgttttcttttctgaaaccaggtggttagggcaaggaatcacagaattacagaatgttggacctggaagggacctgaggggtcatttggccccaggcctctccaccgccccccatattccctcccttcttttttcctcctggggaagcaggcctggttatggccaagtgaaacacagggaggagcagggggagagaggagaaggttgttgtgtgggatttagaagacacccatgcacagaagtcaaaaaaagtaagtggaggtgagaagctgagggtgtgggaaggaggtgatgactgatggagtggaagagctggcagaatgaatgggtcagcaggtggcttcctcttacctgtgttctgcaaacgtttgaagcctgtgtcagtttgtggtgctgagacataggttacattttggacaatagcaaaggaaaagtatttaaatatatttttagtacaaatgactattacaaggacaaattattggagaaaagaagtgtagggtcttgataagagattgcctatttaaatttccttgcattgcaaagggatagaaatatccagaaacccagttttgaaagccttttttaaaacaaaaacaaaaacaaaaaaccttctctttctttctcattctttcattctttcattcttttcctccctccctccctccctccctctctccctcccttccttccttcaacagggtcttgctctgttgcccaggctggagtgcagtggtgcgatcagtgctcactgcagcctcaacctgcagggctcaagtgattctcctgcttcagtctcccaagaagctgggactacaggcatatgccatcatacctggctaatttttacaattttttgtagacacaggtcttgctgtgttgcccaggctggttttgaactgctggttaagagatcctcctcccttgttctctcaaagtgctgggattacaggcatgagccaccgcacctggccagacctttttttaaaagtcattattttcagttgagtatatttggaacccccataagttactaggaaataactcttgtgaatgggtccttgttatagctggctgattgtgtgaacactgcgtttaaggtcttcagcatccagctgctttctgttaaattctacagcagctgtcacctcctcatagacaagacagggaagggtgggttagtgaacacttgatcccaactcttatttggatctgggctgctttaaagtgtgtgagagacagaggcaggaaaggtggacgtggacgtcggagaggatgctacgtgcagaagccatttcaggggccttcacgtgcatcccacttaaccccacagtaaccccaggaggaagatgtcatttccaccattttacagagggcttagtggagggctaagtgaacctgctcacatccaagttactaacaagtgacaaagccagaacacaaacccaggcttcctgactcttgagtttaatgcttgttgcctgagctgtactttaagtcctagccaaataagcataactcaaaaagggaagtggtccacctggatgaacatccttgtttagttgaggcagagagaaggggacttagaggagggctgggctcaaaaagtctaagtttgtttctgtactctcatgataggtagctaataacagaggtcaaatcccattgagacaaaatgaaaaatttcttttaataaagactctaagccctggccagcgggccgcgtttctgaagcagaattctagtagcatgaaagaatgttgattaccccttggaatttgttagaataagaaaatttgttataataacatttagaatgttggactgtgttctctcggcagtgcatgagcttctttctaagcacagtagtcacttaccctgagagccacgggttgtcacttaactggttcagcctgtgcacactgggtaggggaagccaacttaaaggaccttgtgtctggtgcagtaaaaactgttaactccttggtaacaccttcggaacccctgaaacttgactccagccaccagttgagtatgagtcaccgggccatgccgtggagagaggagcagtagggaaaggaggttccttggtgaggtcagtggaccataaagtgatatgtttatcaccacggctcagactgcactgagcaagcttcatcccccacttcccagaatccgacctggctctacctttcttgtacccagcgatcgcaggccatgaggcctggttgctctaacccgagcagttctcagagtgtggtttttgccccagcagcatccgcatcacttggggacttgatggaaatgccagttctcaggcccaacccagaccaactgaatcaggaactctgggggtgggacccagcagtcagtgtttcaatcagccctttaggagatctgatgcttgctgacgtttgggaactgctctcatctatatacccagaatgaaagaatttaagagttttgctcttatcccagctggtcttgctgcgaggcttcaagcaacattgacttaccaccagagcctcagtttccacagcaggaaaatgaggtgtttgcattaccccccaggttcattcctgctctcagagtatatccttctgtgtctcaaagtcatttgtcaatctttccctaaaatacaaataagcatgtgactccccctgcccccaaacttgccaggtttctacccgggaattcccctttgtggtttcctttctacttggcactcggtataagttttgatgccaggcattcggaaagtcattggggagcgggggagaaaccacacacaacaaaagtggtcagcttattcaacttagtgacaatggcttctgggactagagcccttaataacatcaacttttgaacaattagacctttcctagtggcttcacatgagtgaatattttgttatttgtctcaaatctcacatcattgtttgttaattcaggaaacctataccatatgcccactatgtgccagatacaagccaggcacacctatgaactggatatgccggccacaatcccaggagggccctagtctcttgagttccagactgtcctgtccctggcccatagacgctctttcttaattaaatttcaaccttgccgttccaatatcattttccatcctgtgatgtgggggaggcatccgcagggctgcagctgcacggtgtgcatacctcatttgctcatctggcaaaaccctcagcagatgtggagggaggctgctctagcagcctgagtcagtggagccttgagcttttctctctgagggggaggggaattagaggagactgcagagtgcaaacccaatgctctctcgcaacgagccgacaaacagaggctttggtcccctttgttctggggtggtgctgggggtgctgtggtggccagagccatgatgccccagtgtgtgctgcggacctcagcacaagggaggttgcacaagtggggagggggagggacagtatcaacccagtcttgggaccccctggttggattccttactccaaagtgagacttccatgtggacttgaaccctggcatcctgtcctcaaaatggaaaaggcagaagtctgttttatagtagtgccaggcctctgattaattatcccttctgaaaaaagcatgctacacctagaacttccttgacactggtcccagctgtcacactgccagcagtttctttcaagttctgttgaaatatttaagcccgtggatggaaatcccatcagccgccgtgctgtgtaaatggcatgtgccgttgtgggagtgtcttcagattctggtacttgcatcactttcccgggtggaggtggtgagcaactctcagcacagtgagataatgtttgcgaaagcactttgtaaactgtaaagtgccatataaacttgagttgtctgtgttcagattgtgagaaagagtgaaagtctgccttctttatttcccccaaattcctacctttcatcttcagagtataaagtgctgtgaggaatacatatgagggaaagattaattctacatggggtgtcggaggattaattaggtggttgcttctcctgatagttgaaataacaaatatccaaggaggagtgcatttggggatagaatggattgaatgttaaatacgctgaccatgaaatacataagtattggatttttagataggagatgcttggtagacagatgacagtataagtcaactgctcagaaaaggagtcatgatctaggtacaggttgaaaccatgggagtgattgagatcacctagaaaaagaatgagatagaaaggggattgaggaaggagctgagaagttcttagccttggtttatattggaatctactacgagcttttcaaaaaagaaagctccctaggccccgcctgggtgttctgaatcagattctctgggttggggtctatacagattctgagcagaggaggaaccagtggaagagatgtgaaagataggtcagaggaaacagacgaggacaggaagtatcacagagaacatgcaaggagaagatttagccaaaagaggcccctagttgggggctagtcaataggcggtcactggtgaccataacaggatgcatttcagggcagtggttgcggacttcacagacgaagaaccatcctttgagctcgtggttccctgtgtctgccatttgctcagtttcactgtcaccctccttcctttgaatctggttaccgagtacctcagtggtttgacagattgtcctgtgcctctttcagatcaagtgttccctccaaagtgcaacatagggaagaattttctctcactcaattaccttgctgagtaccttcaacccaaagcagcagaagggtgtgtgatgtccagccagccccagaatgaggaagtacacatcatcgagctaatcacccccaactctaacccctacaggtaagtgagtctaagtgtgtgagtgtgacaagagatgaaagtaaagatcttccttgacttgaggcagggagaggtgtagcccgtcctacaccctcccctacgcaggagggaagggagccattgatgcttcacgcaggagggaaggtagccattgatgcttcaggtgtgcttcatcagatgtgtttcacagaagctttgaagaacagagtaaaggcaccagtggtatattttatattctgcatctgtccctagatcccagatatttcagatgaattcctgaagcctgttccaaacttctgggtgttaattacaggacacagtcactcttccttcatctttatcacctctgactaaggttatccctgataggaaaattacaaaatatgccctattaatataattatcatcttagtaaccttctgtttttaataaagctctgtttgtggtgtccttagagcgcttaggcactcagagctgtttgcgttaaatctgtgtgtgtgtgtgtgtgtgtgtgtgtgtgtatgcgcatgcacgtgtgtggtggagtggctcttcatggtgccataccaaagagccattcgatagaacttgcctctcccttgtgtgcttggtgtgtgtgtgtgtgtgtgtgtgtgtgtgtgtgtgtgtgtgtgtgtatgctggagtggccctccatggtgacatacgaaagagccattcgatagcgcttgcctctcccttgtgtgcttggtgtgtgtgtgtgtgtgtgtgtgtgtgtgtgtgtgtgtatgctggagtggcccttcatggtgacataccaaaaagccattcgatagaacttgcctctcccttgtgcgcttgttctccctctcagcttcctacccctggattggaaattcgaccctccctatcaagaataattagggaattaaagaaaaaggagaaaaagtaggttcttttcccacatgagcctgcatttcaccctccttcctttgcatctggactagtgacttgaaaatttaaatgtatattgtagagggatttcgaggtgaaaatgctaatcggggtttgactttcaaagcgtgtaagctacagatcgttttgataagattccactctggccacttgaagaattttgtagaaagtgaaaagggaatgggaataggagcagtctggtgaatgtgcttcgacgtcaggcctgaggcttcattggagtataccatgcattttatgctttacaagtgtgtaaagctgagatggaaagaaagactgttcccttaaattcagaatgacagggatgttattgtttagtaaaaaattctcttttttacgaattcttagaagtttgggttgtgttcatcaattttccagtaatcacttggttgaccatctgttttctttattttaataaccttatatccagaagtttgggaaagtaaatgcagatacgattctgtagcaattgttaatgacttaagcaaaccttatataaatcaagaaattctttagccttttgtctcttattttactctgaagtttcctaatttttttttttaccaccatgcttcccttatcccaacaccccgcccccaactcaccaaactgccacctacttcagttttgaaggaatttgagcatattagccaaatgggaatcctgtacgtcgaaggtgttgaaggttgaaaaagcaacaatactgcttcaaaagtaaactcttctggttcgttcaagtccacttcaaacagtggctgcattaagtaaccacctcttttccatcaaagaagagaaaaactttagtgactaattatcagcaagcatatgtttctattgttatgtaaaacaattttgttatgtgtgcagtaacaatctgttttgcacatgtcattggcctgggatcaactccagctttttaatcaactggccagacactagaaacatgaagacttggaagaggggagatagttgcaactttctggcatgtaggtcttaactttgcctttgtcttccattcacagtgctttccaggtggatataacaattgatataagaccttctcaagaggatcttgaagtggtcaaaaatctcatcctgatcttgaagtgcaaaaagtctgtcaactgggtgatcaaatcttttgatgttaagggaagcctgaaaattattgtaagttggtggagcatgtcttttgttttgtttagataaatgacaacaatttaagctgtactttataagtgttatttttaaagttcctgcctctttggactctctaagctctgtcaattatttttcactttgcaaaatagcatgctcctataaaataggtgcggttgttcaaacatggccttggattaagacggacccaggtctgagtccaggtaatcccactgtgacctttggcaagtcccctaacctctctgaaccccagctccctcatttgtgaaattcctgaaatacattagtatgctttccactaatagtaagtgtaaagtaatgaacacaattaagccttcatattgagcatcccacaaggacctcagtgtcatagtaccgaatatcagcttttattttggagttaggtacttagagaaagtatggactattaggctgaccccagctcacatcattgacttttctttttgagttaaatacgaaatattggcatgtctttttgcttgcttccaactcctaagtgtgaaacactgatagaagaatcacagtaagtgcgaagtcagtgaaatgatgctggacaagtctactccagcttgttcccaaggccctctatttaatagagatgtacgcacaaggcttagcccattggcatgatgggcaaacagcagctggtttcctcaaaagttgaatgttgaaacttggtaaagtaaatcttatctcaaatatgcttaggcaataactatttgactgaattatattgaaagttaaagaaaaatcctcctccctattttttaagaagataattatctctttagtatctcttctatgggctcaaattttttttttttttttttttttttttggccaatctctcttttagttcctgcactgagtaagctgaagtgggttttatgttttcagtattttgggagagggatgcccttggttttggtattattcattcattcatggcaccttccatgtgataccacagtgagcaaagccaacagttcccttggcaacgtcatgtaaaagcactcaccagaggcagcaggcaaaaccactagcacacatattttaattttaaagtaatcgtttctggttcccgtgggttttttttttttttataactttgctaggatcccagtgagccatcatatgtaatggtgatacattaatttgttgtcaagcccaaagcctagccatgatctgaagtcagagatgttttgattgccttctctggcatggcatgaggggtgttggtgacctaggctgtctgctgcttttgctgcctggcacaccggccaaatgtttttaatttcagaataacaaaaacaggaaagggaatcatgctttgaaaggcaaaaacatacggtacattttaattccctgctggagttcttgtgtaaatattctttcagccttgacccttcgatggctctttccctgagtatgtgtgcctggtccatggcagtcctggagttcactttgaatgtccccatctctcatatgaatcagaaaggctagaaatgagattgctcatcccagtgcaagatctgtttatgttcctctccttggctgtacgcttgttccaggccaattttggacaatgcatgacaacattactaaacaattaggtaatgtttcatgatgttcttttttattctcccaaccagtttatgctttgtgattttctaattccctgtttcagatgtgaattctgactgtgctgtgagggaaaggtacctgctcccacaaaagtttaaattactatttagaaagggggcaatggtttatagaaaccttgtttctagtatttcctttagagacagcatagtgaaattgaaagaatcttgactttgtgccagacagggctagatttaaatcccatttccaattactactcctagtagatgttgtgcagtctgactgatgaacacggagtctgtttggtcacctgtgaaatgggtatgatgatagtactcaccttgagtttgtggttcattagctgagttcatttgtttgttcatttatttgccaaatacttgttaagggcctataggatatttcacctaaagcactggacacagggcctgcacatgtaagttctcagctacatgtgttgcttctgtgagtcttaggttctccttctctaacaggaatggtaatgcctatctccttatattttggaagagaaataagataatatatgcctagcagagtgcctgccataaaaagggggttcatcttccttccataaataactctttcagagtgtctataggaacaattagggcacttctctatacaaggtgaaaagaaagaaagatgtctactaagggaattgtaaggagtctgatggagtaatttaaagaagagcaccattaaatatggatgtcttatgcatgtgtgtgtcgggggtggggcatgggcagaatgtgtcctccagatggcaaaatggtcaaaagaggtgcaaagagccaggcagtgggcaagaatgggaacattggaggtgtctacattgccttgtccagctctggctcttttctcaggtcctgtgtggaccatgcataatcacttttatggtaggaagaacctctaaaacataaaaaaatagatggaggaaacctgttagaggtttcctcttatattatttcatgtggcctcaggacttcagggttgatgatgggcagcttgttcttagagaatacatttttaaaaatctcagtgggcatatgcactatgctctctggccattcccttccttagtcctccctcccctataccatcagtccagatgtaaatatgggggagtgtggaggcacttagacttaactccttatctttcatgaagatatggctgggaaagatggtggtggtttttggagacctccttgtacacctgcatttggcgtagctccactaaagctggaaaaagcctagggacttccagaagtacagtgtgagaatttgctcaaagctgggaaccaacttgtctgccattgtcccaagccttgctgctttacaaatgtgtagatagatgttgagtcttttaagttcccagacataatcaaaatgagatgtattgacagctcctagatttaatgtggaaaggtgcaaacagctcattccacattggtgcaaaaggacaggtggcagttatgatgatagtgttctggaaatacgatattttctcagctgtccaacaacatgaaagagactagggcagatgagggcaagcagtgttgtttaggccaattgttgtgattccagccaatcaaaatgacatgtagctctaaaaggctggaagaagctgtacctaagaaactactgttgactgaatgcataaaaagttctaagaataaattggatctttcatgatctcattttagctctttccttccttccttcctctttgtttctttcctccctagcccttctttaccctaaggagtttttttctgaattggagtaagagctaaaatattctgaatctattaaactgagtttacaaatggccgcagaagttggttaaagttctgtctggttcctttgcatatagaatttgtgactggtgagtctggcagtattcccacacataagcactttaggtaatagaaaaatatactgaatgagatcctttaagatttgagttgaaatatatgtggcttcagccaatatcccacaaccacataggccaagagaacttagagcctgtgaatcttttagggttttacagtgggaaaggattaatatttagtcatgttaggggcaaacagaatgggaaacaaatgaggaatttaggaaaaatgctgcatgcatgcaggagaaaatcactgggcatggaaattaaagtgatttttatacagcacgaaaatggtgtaatctgcatgctggaagggctttccagccctgttggtgcagttgttgaaaatatggtaccttccctttggggtcccctctgcagcatttagctctctcaccctctgagaagagcactgccacaggagtcagcaactgatgtataaatttaccttccatgtccttgttgaataacctggttgagtagagtccatttatatcctttcccaaaaatatttctgtcattttaattttgtaattgattatccagtgaaagctagtcttttttttttttttttttttttttttttaaggcagggtctccctctgtcacccaggctagagtgcagtggcatgactatagcttactgcaacctctaactcacgggctcaggtgatcctcccacctcagcctcctgagtagctgggactgcaggcaaatgccaccatgcctggctaattttaaaatttttgtagagatgggatcttcctgtgttacccaagctcgtctcaaactcttgggctcaagcagtccttccgcctcagcctccccaaatgctagtattataggtgtgaagtattgcacccatccctgaaagctaatcttaagacctacttgtattactggataaaacagtgatacttaaggggagagtaacctaaattaattaattaatatttagaatagaagatacaagtatattcagttagtagaattggcaaatgaatacagttatagaattactaattgatcatacattttagatgaaatataaacattggttgttttaccatgtggaatttaatagtttatatagatgggatagtctccacactgaagtacagtcttgagcatataatatggttcagtcagtgagggaccacatatacgacagtggtcttatcagattgtaataccatatttttactgtaccttttctatgtttagatgcacaaataccgaccatcatgttactactgcctacagtattcagtgcagtaacatgctgtgcaggtttgtagcctaggagcagtaggctgtaccatatagcctaggtgtgtagtaggctctaccatgtaggtttgtgtaagtgcactctatgatgctcacacaatgactaaatcacctaatgatgcatttctcaggacatatctccattgttaagtggctgtaagtgattgtgctatctttcattgaaatctaggggaataggaagtggaagcatgggaatttgagggcaatataacatgtctgtttgtatactttatatgtcattttaagtaaaaaaagggaaagtttattatacatatgtactgtgtgtgttaataatttaaacattagactaactgtacagttatagactaggcatacttagtatgtaactacttacatgtcattggatgattttttttatcagcataggcaatacaaatagtatgatcaagcagcatacgtagatgtcttttagtcggctattaaaggtttttcacatcatcgttcttagcccaaggaaaacaggggtcaaaagaataaataattccctcatatacaatatagaatctacttatttaagatatttaatttttattatctaaagtactgtttaattttagactcatgagtgatttttttgctatatcttcaggctcctaacagtattggctttggaaaagagagtgaaagatctatgacaatgaccaaatcaataagagatgacattccttcaacccaagggaatctggtgaagtgggctttggacaatggctatagtccaataacttcatacacaatggctcctgtggctaatagatttcatcttcggcttgaaaataatggtaagttagaagttttttaagttatgtaaaaaataccccccaaatgaagcttttccagtgaggaactgtcatttcagcttatatgttgctgtttttctcttgtacattttaataatttgactactttttatcagaaggcttaaaattacctagacagagattttgaggaaactgtaatacagattttcagtgacatagagttgaatgcatattcagagaactttgttataggttatctttagtgtgattacattaggttcttctctccgagacacctaatgaccacttatggctgagaatacagaagagttaagactgcaggaaagaagttcatggtaaaaggctgtatcttttaggaaaatagtcacgaggactcatacttgagtgttcatacccagaggatggcaggagttactaccccagctgaatggggtggaaagcagagggtcaacaaattcttgaggttttctggagtcttctagctagcatgacttgaaaccctagttttctgatccctagacctgttcctcagctcatggtaccaccactgagtgaaatgccaatagaataaggattaggagtacaggttcaagccccagctctaccatttagtcactgtttggggagaagttgcttcacctctgagccacagatttttcttcagtaataaggggaaaataataggacagaccttacagggttgttgtgaaggttttcgtgaaagtacaaattaaaaaccctacaaagctatgacttattttggacccttacagctctagcgtcctttccaaagaatattattaaaggagagataatgtccaactatcatcttcacttccagcttccactgagatggatttgacctcaagtgtacatcagttggccttagatagtagatataaagaatactggggaaattattatttttttagttgttagaaatacgacaaaatattgagtattgattgtatggaaatacgtctctccctttgaaggaataaatgtatctatgcagctatttcttatctttcaagggaatatgttccaaaaggccaaggtgcccagatacctgttaaaatttagctgtcaaaaagaaggtggtgaagtaattttaacataccaatattgtttcaagacatcattagagaaattattcaaaagactctcttgattcaaggaaagtattttagtggcatttcaatggaatattattgcatcatgtaacttaaatcacagatttttctagcttggacagccttagaaactgtctattccattggttctcagtcttaggtgcacattgcagttacacatggagagactaaaacatattaatgattgggtaccaccccagagagtctgagtttaaattgtttggggtacaacctgggcgtaggaatattttttaaagctcccaagtgattttcatgtgtagccaaagttaagaaccactgatcatttccaaccacttaatttaaaaaattggaaaagcaaatttgaggcacagagaagcaagccgcttgcctaaagccactgagctagttagagagaacaccaggactagaattcaggcttctagacttctaatgacctttatgcactgcttattaaaagtcattttacacctgcccattctatgctaattcctcctgttctgcctgtaatgatgttggttgtggcctggcatcaaacactgctgatgttttgccttcttctttcaccagcagaggagatgggagatgaggaagtccacactattcctcctgagctacggatcctgctggaccctggtgccctgcctgccctgcagaacccgcccatccggggaggggaaggccaaaatggaggccttccgtttcctttcccagatatttccaggagagtctggaatgaagagggagaagatgggctccctcggccaaaggaccctgtcattcccagcatacaactgtttcctggtctcagagagccagaagaggtgcaagggagcgtggatattgccctgtctgtcaaatgtgacaatgagaagatgatcgtggctgtagaaaaagattcttttcaggtcggtgcagctgattacaggagggaagagaggctacctcctttcccatctggccctagtctgcatctgtaatttctccctatctctttcatttttgaactccggaggcttgatactgttttctcagttggatgggcctacttccccttggctgtgattctcacctggttcctgttgttctcagtgacagggggtgggggttccagatccttgtgtgtcaatattttgctattgaatttccaaggccaacagatactacccttgagctgttgagaggtgggcagctgggaagagatacttggggaaggggcacgatgcaggcctctcatcgcctgtccttggaagaccaggcaattgtcaattgtgtcaattatacaacagaactgcctgtgggcctccaaccatgtctttggtggttgttgttttaggccagtggctactcggggatggacgtcaccctgttggatcctacctgcaaggccaagatgaatggcacacactttgttttggagtctcctctgaatggctgcggtactcggccccggtggtcagcccttgatggtgtggtctactataactccgtgagtgttttccagaacaaagctttgccctttgccagagcctggctgtgtgctcccttaaagttagtcttaacatttctttgaagatgaagagggttttcaccccaggcctgaagaaagccaagtgtcagttctcaacaaaatggatgtactttgaccctgagctctttggttttatttgttttattggtgagtctttgggaattggaaggcctgttttctcaccccccgtttccgtctcctgatgacaaaggctgcactgtcaaggtgattatgacttctctcagtgcccaagctcaactggcccttataaggataaaattttaaggccctgggctatatgaacgagcagcacctctgcacagccgggttaaccagatgtgtggtctctctggcctcatttgagtctcgtccagaagtaggagaacttctccctccttcatgaataaaaatccaaaaagagaatttaaaactcaaaaaggacctttaaggaattattaagtctctctccacctctaagaaagaccatacattgaagaaactctcctacttttgaagttacttggagaaagattccacagatttcccccaatgataaaccgttgcaatagctaagctgcattttccagaaatctttcttctcagttggtcaaaatcttttcagattaaacccattctcttgggtgcagagactaggcagtgaatattaaaagaatttaaaatgtgaagttccaaaagaactttaaagtgctgattttgcattttgggttttacttttaatggtaaaaataaggctcagagatccctgtgtccacctttgacacagggtgggttggggtgggagggggggtgtcttcttagtgccatatccagctttgacatggggtggctgagctgtggctgctagttcgaccccatccagagaagagaggctagcaatcaggtgctctggtcagcgtggttcctgtgggaagtgactctcccatgaacccaagcatattgttcctcagagaatattagactgttggagcagcaaataaccctaagatgagcttattcagcttcttcatttcacaggtgaggaaactgaactccaagaagttaaaaagacttgcttttttaaactccagggatgggctaatggcagagccaggacgactgaatccaacttcctgacctcttgtccactaatctttcctagacaccaggctaggccctgctaatctccttttgttactcaaataattaatttattaacctttgacctcctgataattgcagcatgaattttcgttcagttatccagtgtctacagatataatgaatgtcatatattactgaaatacttgattatggcattttaaaactggggtccaagttaacaccaaaagtggctacagtaatatgtctgttaagaaaaaataaaaaaaaaaaaaagtcagttgcttcaggagagaaaggcatgtaatgatcccttaaagttcctttttttctcacatatttttcttttctttattatgatctttgagtttagcaatatcctagatgcttcctttaattggcgtcagtactttctttggaggacctggtacagagagaaaggcagtttgttttttttttttaattttcttcccatcctactccctttggagactgttttagctgttctcaccaattataattgtttgtagtaattttcagacttactatatatttctattttgcatcatgttcagaatccaagcatgtgaagcaaaagaaattaggatttcatttatggcgtcatgacccttgggtgaattttctcatcctatttagaaataatccaggaatcataatttcaacctatgtcaagatagattccgggaatatatctgcaggtggatagcgaaaaaggtggaaaaaaaagattcctggaataaaacgtattcttttccacatccatacaccatagagaaagatttcttagggaagaaatgagcaaaagttagaggggtacaagagcggcaatgaagagatgtgctccatagtaaacattaggtccttcgctgctgactccaaccaaactttctacaactcttaaaggatatatataaccaaacattaggtccttcgctgctgactccaaccaaactttctacaactcttaaaggatatatataaccaaagcttcttgtattcgccaactgctagtagttcttagagtttataatataaagactcttaaggggaagccccttctcacggtataggcaagtctcttgacaactccattcaactccattctagtatctagtgttttcccaccatttgaaatcatttgtaattattcaatatggttacaacataaatatttatttttcacaagagaagatacaaatattagtttagcttttaacttgaacctgcattgggtttctccttattcttcatcactttgaagatataattcgaaaaagcctggatgttattttattattttgtcttaaagtcagattttcaatttgcatcagaatgattacatgagtgtttgtgtgaggcagaaccaaacacacatggtttggtgtttttataacattggctgtgctttctttgccttttagattgtgatacaggttccagcccttggggacagtagtggttggccagatggttatgaagatctggagtcaggtgataatggatttccgggagatatggatgaaggagatgcttccctgttcacccgacctgaaatcgtggtggtatgtgtttgttatcagtagggggtttgtggaaaatgctgtctattttgttggctttagttagggactatctgaaaataaaatcagatgttaaaagccaaagctcatgaagctacagggccttcatccttcatatgactgtcattaatcttcctgtgggttgttatttccagtttaattgcagccttcagcaggtgaggaaccccagcagcttccaggaacagccccacggaaacatcaccttcaacatggagctatacaacactgacctctttttggtgccctcccagggcgtcttctctgtgccagagaatggacacgtttatgttgaggtgagacctgaaagttagccttgaccttttaggttagtgctgggctatagttccttagacatcagctaaaataccctgtacagacctcttcctgtcctacctcacagaccttcaacaggtctgatgagggattggctcagagaacgcttccagactgacttctgaccaaagcaggaaatttcaagatttaatacattatgctaagtgaagacagtattttgtagatgaatgttaacaaaaaaaaaaattggcaagtgtgaattctactggtaaagccctgtcctttgcttttggaacagtagttcagtagttgcagtgttagagttaaccatggaatatttcaaaaccacctcatatgttatcttttatttctttttttttccctgcacagtccccttagcccccagcagggcagccaaatccctgtgggtccatgccgccactgaaactgacttgttatcttttaaattgcactcacttttaagtgaaatgctatgtgctattataactcatgacatttttttttctagatcatgatctgagtatctgtataaacttatttaaactatttcctatatataatgttaataatcatgtgcaacctaaatctggaatctggagtgactacacaatattaggcagtggcggtaataatgaaataacaacatctaacatttgctgcagatttattatgtgccaaacagagttgtaagtattgcagcagttagttaactctttagagccatcctataagggaggctaataatatcttcattttatggatgagaaaattgaggcacaaatttgtctgaggccacacagctggtactagtggagttcagattcagtgctcataggccgtgtgactccagagctctgactgatcttcgctggatacgactatcacttatctccaaagtgccatttgaaaggggagaaaacataacgtcttatcaatgcaaacatccaggttcagagagtggattctagaaaagataaatgtccttatggcaccaggatgtctgctgtttcttgtgccctgggtacaacctttcatgtttcaaccttagtgtttcaagtgggcatatcatctgttggtcttatgggaaggtcctcatctaatgagctggttttggtgctcagctgcaagctcagcttcatagtgggaggggtgagaagcttaaagggtcaaagtggggtacttccatatgttaaaagtgactttggtgcacgtgtttctgttttggaaagacacataactctcacattcgcactgactctgggacagagcccgctggcgctagatgttgttttccttgatcatatggattctgcccctcccccattctgagagttctctttctttgagcacaccttctttctccattggggaaaatatactgccttctacatgcttttcctaagccaagatggctgtttttctcttgcttttctggctgtacagttcacatgggcagttggtcaacagcaccctattgcgctgtggatttcaggggtgctgcataattgcagattgttcttttccaaatctatgcctggctttgctgatttatgctaatcagtggtcaatcttcctcctgtaccttaccctggatattttgggttttttcccccatccttcaaatgctggcttacttgaagtgtgttattggtagttttttttttccattcttgttttcccatttataccttttcatatatcacctatatttctcatagtttatcctctattccctctacaccatacagtccctttcataatccaagttaacagtgttgccacctgttcattggtcatctccaggtgactgttggtcacataatggcagttttcttttggttcatttgtcttggggaatttacaaacccagttgttaataacccaaaattttaaatctagaatactactattactaataggtagcatttattgacactctgggaactgtgttgtttgcatgtaacttttactttgctagttttcacaattatgatatcttgtgggtattcgtgttctcattctgtaggtgagtaaactgagtctcggtgcccagcacgtgagcaggagagcatgtaatttttatgagctcgtctcactacaaagcccgtagtccttctcctactcacttctggtctaaaagtaaaatcctttttagtaaaagatttgctgataatttatatatataaactatatatacataaaatatattaaaaaataatatatattttttccctctgctacaaaggtatccctttttgggataccttagacattctgccgctacatactttcttttgagattagagaagagatttgcagtccctctgttacacattttggcatgtggtttctgagttcatgttaaacggcagtttttagtaatagcacatatgtaatttgccacctttccaagatagaatatcttgtttttcagaagtattgcaaaaatactgaagtgttagtatttacagaatgtcaccacagtgacattatcagaatcctcttcattagcattttcactgttgagtgtcctgcagttaaccaccacgtaggaatctttcacaacagtgctgcggattcaaagccccatgtgatgtcaggggtttcccctgggtatctcagcgtggaaagtctgtttctatctccatgtcttttgaaatgattctgcggctgttggtctatgggtaaggactagctgtttctacaagtgtttaagtttattttgatcctaaatttagtcaaagaatgaggcatagcagggaggggcagttcatgcagtgatccacgtgtcaccaaatggagaatctcctctggtctggggattttagctaagttcaggatagttgaggtttgaattctgtttacacttggctaaacattacttcctgtttctaaggaaaagaaccttaacaaaatttggacgtagcccatacaagtgttttcaaagggggaagtataaatgagtcggaaacgtttccagattagatttcccctaaactacccctgggcttatggagcgaagggggagtacttggcaaggctgatttggatctgtgagcagctgggacactttaccaggcccatgatggcctccaggttgcaccgtcactgacacccagcgccggagccagctctgccttctcgccgatgaagcaggactctcatcaggcttactctgactttttgcaatttagaagctcagtcttcctgcctaggttaaatagattttgccgctgaactctattttttggtcagtctttaaaaagagcttagcttataagtgttgtactattaaaacattagggactttgcctactggtgttttatttacttcggaaaatccactttaaatgcaaaatatgtttttatttttagctctcagaggactcattgggaggtggaagagacttactcatcttgtatttgaatctaatggactaatatttgaaagaaataattcactgtcatcatctatatcaaattgaagtggaaaatatctttttctttcaacgtgtgtgtgttacttttgtaattagaaagaaggctataactatgttatgaagataaagcagcgtgtcatctgaagggctgtcttggcatatggtccttgtgcctaaagtgaaagtgagatgctaactcatttcctaattcatctttctgttctttcataggtatctgttactaaggctgaacaagaactgggatttgccatccaaacgtgctttatctctccatattcgaaccctgataggatgtctcattacaccattattgagaatatttgtcctaaagatgaatctgtgaaattctacagtcccaagagagtgcactttcctatcccgcaagctgacatggataagaagcgattcagctttgtcttcaagcctgtcttcaacacctcactgctctttctacagtgtgagctgacgctgtgtacgaagatggagaagcacccccagaagttgcctaaggtttgtgggccttcatccattcggatggttattttggcatttttaggtgaggcagaaaagtttaatcccaaggtcttgcaggttgaggttttttgttttggaactgcccaactgaaatattaaagtcactattagcagggaactgtgagttttatggagtcttagataataaatcctgacagcatgattttcttttttccatgcgtgctacttagtagtaccttacgagtgataaatcaagacgcttttccatggagggagatttctggctttatctttgcttttcagatagtttgcaggccaaaaatacagcaagccgaaaggacaagttcattgtgagaattaatttttccaggtcctgctgggactggcattgtcattgttttttaaccttttctgtgtgaaatataaggttgacttgtctcagggagacttctaggggaaactaacaaatattttagcttttctcagtttcatatcagttcatcatatttgcctcctgtcactctccagattgaatgttctattgccataacaaaaagcagaaccatttgaccttggtggaatgcatttgataggggagatctgcaaggttaactatgatacccactaggttggtcttgtatatgaaaggtatcttctgccatagttttgtttctgtgatctgccataattatgtataatttcatatgtgcatttattctgtggctatctcacacagagtaaactgatttccagtcctttcgcagtcatatatcaatgtctaaaaggctaagaatcaagcagtattattaataatgtatgtatggaattttctcatttaactcacagattttaagtcttaggtatggaggtaggaggaaaaaccaccatttccaaatagattacaattgatctgaattccttgcatcattatagtcccctgggcatccttttctctgataacacccaagagaattttgtttgcatacgaaaatagagcagatatgatcataatcattggggagcacatatacagtgatttagactatattcctaggtttgcttttgcggcggtgatgccttagccttgtaggcattcaccatcagggttggggcttagtggacagtggtagagagccatgaggagcttcatgtgtggctgtgggaccagctgcttcctgtgggcagaagggtaacgtttaagggttagaggtcttggaggggagacctagcagttaccagggatctttgctgtggctttggctgttacttctctctgacctggcctggaacagcccagcttcatgtgtgttaatctgggaaaattaatcgtaaagagagttctaagcctcaggggatgacatgatgggatataaccctaaacctcaagtcgccctttacccccaaggtaagataacatggaaagagcctgggactgagaaggaagctctgctgccaccaatgggactttaagccagtctctggaccccttagagcctgtatttcctcataaactgttataatcatacctggcttccctcctgggtagaggagcaaataggacagtatgtacaatgacagccctttatctggcagaggcttggatgagctgttaccactgtctttctgtttgctgcttataggtaatattttcacatttctattattttctgagtgctttctgtgacaatagagagcgccaaagaatcttctaggaagagatctcagagattgttgagaccaaccctgccctttgctgatgaaaccgagacccggagagcagagtgtcttgcccagggtcacactccactgagttaaatgcggaatcatagactcttgcttaactgaagagctcaataggaaagtaacagtaaactaaaacaggaaagcaaaatgcaactcttttcagtcatcatgcctctccacagaaaatttgttgtttttctttacaagagggctcttgttaaaggcttttctctttttgagggggtaagagtagggcagtgagggttgtcttataagaagtgtctgactggcatgttgctcagagcagcaatgacagcaaggcctaaagtctttgctcttttgtgtttggaaaagatggaacttgattagctttttgggatgcctgctatagacttaaaatgatggctgtattaatatgtcttcttaccatagaagctgtcatttactttagagttatacctattaggctgggcgtgggctcatgcctgtcatcctagcactttgggaggctgagcttggcagcttgctgggagttcgagaccagcctggtcagcatagtgagacccctgtcactactatatatatattagctgggtgtagtggtgcacacctgtagtcccagctactggggaggctgaggcaggagtatgacttgagcccatgaggccaaggctgcagtgagccatgattgtaccactgtactccagcctgggtaacacagcaagaccctgtctcaagaaaaataaaaaagaactatacctattgataaatatagacaagaaaacaaagttattttaaagaaaaagtgcggagtgtgatcatattttttcaaaacagatgtagtgggcctgagcatgctcattaataggtttgaagcggctaatctcatggcctccacaacctgggcacagcccccaggatctgcattttgaaacattaaaagcagatgaccctggaaagtttagttttacatgagcctataccaggattaaaaatgaaacaaactcagcaacatgattatcttattggagaaaaatgtaaaatctgtcaccttcataatgcagtatagacagtccccatacaaccattctgtttttcaatctaagtattcaataaattatgtgagctattcaacactttgttatgaaataagctttgtgttacatgatttttccagctgtaggttaacgtaagtgttctgagcatgtttaaagtaggctggactaagctgtgttgttcggtactttaggtgtattaaacacattttcaacttagtgatattttcagtttacagtgggtttgtcaagatgtaacctcatcataagttgaggagcgtctttatgggaaatttcccacaatcaccaatcacaaacatgaaccgtgtatatgaagcccagcttggtgaggaccaacactaggcatatagtttttctgtttttcaaactaacactaaaatgtttagttttgtgagaagaaggggagggggaggacaatattgagaagctatccagtgatatttgcatcttcaggtacaaccaaaaatccactgggcctgctgtcatatctcccaggttatttggtgttctctgaaaaacacccaccttcttgcttttctgtagtgaacagctgtgtgctgtctgataaaaggccacaggacagctgtgcaggtagagctggtgaaggcacttttgagtggcccctgattctgtgctttgttctgcctgtctgcagtgtgtgcctcctgacgaagcctgcacctcgctggacgcctcgataatctgggccatgatgcagaataagaagacgttcaccaagccccttgctgtgatccaccatgaagcagaatctaaaggtgtgctttgggaggcacgatcagagcatggggcctgagctctgcttgttaagaagacccaatagtgtaaatcaaagtccagctttattcacaagataactaaagggccagttagttactttagaagaccattttttgcccgaagagtcttttctttagctggttctcttacagccattatggcttagttgtaagtaatctatttgaaaatgatttcctctgtaaaaagaatcaggtctaggttgttcctgtcataaggtcactctcccttgcattcaaatatgcttccttgagtatgcaaaaaagggttctagttagtcccatgtcccgggaattgcacacaatccacagttcatctttctgtgatctactgctaaagtttatgctggctataacctattgtattgctttatcaaaattgcagatgcctttgagaatatgtgaacattattcatcttaggtgtaacagatgagaaccactgcccaaatgcatcttaaaattcagttttcagaattttgcacaatcacatttgttgcttggagccaagcatgcctctttctccacaagcaggaacattcagcaagctgtatcttctgtgagaaaaggaaggctgtgccctaaggggtgtggcatcagtacctgagaggacaggcagggcagagccagacctggcatgggtctggccagccagagcagtagagaggcagaactgggccctaacaaatgttaggagtggatatgaggccctgtgggcggtgagaagagcatctgacaaggacccgcatcacagctccaagggttataaacaagcaaggacacaccaggcagctgtcagcatctgaggggtggaaccaaatgtcacatgggatatctaggcaattacagttgtcaccatctagtaacattgatatctaagggtgtcaaactgagagaaggctgggagagtgaaagtggattccaagcggggttagatatttcaggattagagctacaggctgcctctcgccactctgaggggcacagaggagcctgggcaccaagggccttgacaaaagccagcacactgtctggctccagtttcagggtattagctggaaggcctgctgggtggtgctgacaccagatctagggtttggtgtggccctgggatggcattcctgatctgagcatgttggattgggatttggcaagactaggcagcaggggtgacccctggacagtgggcagaacctaccagaacagaggcatgcaggtactgtctagtgtcttattggttgactaacctctgtgaaaacagctgtgccattccaattgtgtatctggtggtggcatctgcccccttcctatgaatgaatgtgctccctcaaaatggcagaagagtataggtggcaggcacactggattggagctgggagcctaaggcactgcttttagctttctctgctaactggctgtgggacattggagaacccccctaccaccagctctttgggtttcattttctctatctggaaaggagaggtttggactgggtgacttccaaaaggtcctttcagttgtaatactcaactatgctgtttgaagaagcaaaataatctttaattcatttttctggccgtcctaaagttgttgtgaagtgtacatgagatgttctcggcaacatttttgttgttgtttgttttacttttattgattggttttcaaccatttgaaagttataatagacccagtctttatataaatggatggtccaaatagttcctttttattgggttcaggagaaagaaataagaatataaattgtgttgcagagtaatcacaattgggcagcagctggctccattttgtactatgaaagtgattttgttaccagaaaggagtcccaattcagaccccaatagagggttcttagatttcacccaagaaagaatttggggatgagtccacagagtaaagtgaaagcaagtttattagagacgtaaagaaacaaaagaatggctactccatagacagagcagccccagaggctgctggttgctatttttatggttatttgttgatcatatgctaaacaaggggtgggtaattcatgagctgtcctagaaaggggcaggcaattcccggaactagggttcctcccctttttagaccatatagggtaacctctaggctttgctatgacatttgtcaactgtcatggtgctggtgagagtgtcttttagcatgctaatgtattatacttagtgtataatgagcagtgaggacaaccagaggtcactgtcattgccatcttggttttggtggtttttggccagtttcggctggcttctttactgcatcctgctttatcagcggggtctttatgacctgtatcttgtgaccttctctcccatcctgtgactgagaatgcctaaactcctgggaatgcagcacaataggcctcggcctcattttacccagccctattcaaggtagagttgctctggttcaaatgtctctgataatttaacaataagagcagctacctcggattccatctgttactcgtaactattttgagagaggtaattctgctagtaattgaaggcagcggcttgctttttcccatgccagacaataattaggcattaatattgccgcagtataacttccagcaattcatccattcttcttttgagcctggtgacatttttctaagtaatttctcttgcaaattaggtaattacttttatttaaacttagtataattgtactgaaagttcaatgttttcttgtataaaagttcaagaggaaagttttaccaaatatcaaagcaattttatgagatttgctaattgagactagattttagttgagaagcatgtgggtgaagaaagtttattacttaggtttgttaaataaattgaggcggttaaactgtaggccagcttcccaggggctgtatgcaaatttgctttctaactttgcgcttactggggtaagttttctggcaggtttcagctgtgtgtgactcctctcaccttttaagtttattttcttttgactctaaatcatttatcctcaatgcagaccactggagtctgtgctttctgcctcaaggtgaattggaatagtcatttgaaaagagactgtgggctgggcgcagtggctcacgcctgtaatcccagcactttgggaggccgaggcgagtggatcacaaggtcaggagttcaagaccagcctggccaacatggtgaaaccctgtctctacctaaaaaaaaaaccaaaaaaattagccaggcgtcatggcacacgcctgtaatcccagctactctttaggctgaggcagagaattgcctaaacctgggaagcagaggttgcagtgagccaagatcgcgccactgtactccagcctgggggacagagcaaaactctgtctcaaaaaaaaaaaaaaaaagaaaagagactgtgaccatttgcctaattgcattggtttatttgaataataacaggtcacgaatgtccttcctgccagacagctttatgtctctttattgtagaatctgtgactttttgggtaaaaatttcctaaccaatgggacgcttcactgtgcttttactacacaggtgctctttgaaggccatgccaaaactccagctctctctggtcatttggttcatcttatttttcaacacttggattttctgggacagcagataaaggctctggttggcaacttcacagctgggcagagagctgctctgtggccaccactgccaatagcattgacatactttagtgtttcttctgtggacaggaaagtaggcaatcaagactataaaaatgtttctggattcctcctctgggccactgtttttaatggaaccttcctgagcacatctttgccacttttgatctctaagtcccttgggaatcagtgttgggttagcgttcttttaccatttaaatttttaacaatagatgaaagtttaaagctgatggtgatgatagtgatggagatgaggatgatgatctaacatttgttgagcatttactttgtgcaaggctctgtgctaaatgctttatgtggattattatattttatcctcatagcacctctgtatagtgataacttggccaagggcacacaacatataaatggtggatctgggattcaaattcaggcactgtgattccagagcctgtgctcttaaaccctatgccttattccagatggaggttgattctagtttttactgaaaactagaatcatgtgcatctatgtcttcacacccctcttcctgccccacttctcccttttctttctttctttctttctttttttttttttttgagacaaagtctcactctgtcacccagactggagtgcagtggcgcaatctcggctcactgcaacctccacctcctgggttcaagcgcttctcctgcctcagcctcccgagtagctaggattacaggcacctgccaccacacccagctaattcttgtatttttagtagagatggggtttcaccatgttgcacaggctggtcttgaactcctgacctgagatgatccatccacctcggcctcccaaagtgctgggattataggcatgagccactgcacctggccctcttctcccttttcataccatatcacattagtattcaaggtaacaccccaaataccctaatgattatgaactaaaaggaagatgaaggattttaggaaaaatgtctgttcacccaaaggattaagatgttgggaaatgtgtaacctgtttagcagagtattaaagttcaggagaagttctgtgattttcagtagtaactcagaaagcccagagaacataaatagtttatgcatattatggtttatgacaaaacatttaaaatagttgaggtggtgccatcctaccctattttctgaaattttgaagtataggcatattagtgctgtttgccttggattctgtgaccgctttttacagcatttgagaacacttgggcttatacagtaaaaatgattacaccacgtcggtgatgattttttttaaattgtgaaagagaggagtaaccatttctctgaaacagtgcacatacacagaagagcatggatgtggatgtcatcaggagcaataaatatcattccaaaatttgccgtgatttacatacctatagatgtgtttaattcttagcaagttaaatgtttgagatactgaattttctccgtattttcaccacctaactttaaaaaataaaaatgcctgcatatcttggatactcagtaaatgttaatttcctccccttcctctcaacctctcagcaaactagaggttttttgggaagggagggttgaggaagggaaagttgtgaacgtcagttggaagttgatccaagagaggcattactttttggaacacatttgatctttccagaataaaaatactctaaaggaccagccaggttttgtcctcgagctgaggtcgaggtgaggggaaactgagtggaaagatggtagaaatgcttaattgacagaccagggcattcattctctatccaagaagggaaggagggatatcatatttttttttttaacatcgtgtattttacattatttatttatttaattttgagaaggagtttcattctgtcacccaggctggagtgcagtggcgcaatctcggctcactgcaacctccgcctcctgggttcaagtgattctcctgcctcagcctcctaagtagctgggattataggtgcctgccaccacgcccagctaatttttgtatttttaatagatacagggtttcaccatgttggccaggcttgtctcaaactcctgacctcaggtgatctgcctgcatcggcctcccaaagtgctgggattacaggcctgagccaccgctcccggccagtattttacattttaaaacctttttattttgaaaaatttcaaatatatacaaaaatagaataagtctcaacaattgccaatttatggtgaatcttgttttatcactttctgtcatccactggattgttttgaaggaaacccagacatttaatttaatttcatccatacatattccagtatgtacctctaaaagttaagaaccatcagaagatctcaagcaggaaactgatgattaggtcatttatttttattttattttattttattttttgtatttttagtagagacggggtttcacagtgttagccaggatggtcttgatctcctgaccttgtgatccgcccgtctcggcctcccaaagtgctgggattacaggtgtgagccaccgcgcccggcgattaggtcatttaggaaggctactctgaaaatggtgtgaaggttgcattgctggggaaagtactcaagaataaaatatacgtgatatttgtggttatttattcaaaaaaatatggtaggtgtatagtggacaaattatcttgtctttaaggcctttacagcctagtgcaaagtttctcaatctcagtacaatcagtgtttgggctggaataccctttgtagttggggggctgcctgtgtgttacaggatgttaagcagtgtccctggtctctacccactacatgctagtagcaacaccctcccaccaccagcccagttgtaaccattcaaaatgtctctagacgtttccaaatgtcccctggaataaaaatcacccaccacgtgagacacactggtctagtggcaggatacagataagtgaacaagtaattgcaatgaatatcataaatattgaaagaatccagaaaaagggttcagttacagtgacgttaagttagtaaaaactctgtcttaaatggggcctgcacaaagacctcctgagtctccaggaggaatcttcctctccccattcttctctttgccaaatgccaatagatgtgggtaccagttggacgtcttgtttcactgtgggcccactccgtcctatggtgcctagtaccaaattgagcactaaaggccaaaagctgtggtcagttactcatgcataaccccagaaatatcccgtttatgaaaaccatgctgaacaatctgaagaggggaattttggttctagaggtagaccaaaatttgctcagcgtatatgaaaagatttaattcagaacattgattatagtttgtcctttctgtaaagaaatctttattgttacagttctctttacagcaatagctaagattcctttcttataatcttaatcttatccttaaaccaaaagtaaatattgttgagtccactcttttcctctcagcatgccaactcgatgatagggttccggtggagatcaagccattttagttatactcaggggttcttagggattcgggaagagaaaagttcgaggatagaattctttaacctcagttctgcagcttctgcttgttattgtttgtgctcagaaatcacgaagagacttcacccaggggaaatgaacaacaactgtttctgtttagctctgtgagaaggctcctatttggggtgggggtaaaggattagatcataacagaaatccattaagaattttaaaacaatgccatccatcacacaggccttactataaaacttaaactcttacatgggaggtctccttaggagagagtcataatttttcaaccgcttggggattctgagtgagaaagtttaaccatgggtggttgattggatggaattattcccagaagtgtgtatatttcttacatgatgcatcttgtagcaacctttaaatgcctttgaacttagttcagggaatcaaatactacgtcttgaaaggagaagtttgtgggtagatactcttccttcatagagttcttgggagtttaaaatgagacaatataagtgaaggccgaaggctttttgtctattgcaaaacaccatacaaatgtacaaatgtaaggcatcattgttgttattggtgccaatgaggctgatgggacccagctcccagggtagtgcattctgtagttagcgtaattagtgtgtgttctgcatactgaattagattttcttaaaaacatacaatcatttttattttcttagtaattgtatttaagtatacttttgcatatatcctcattccagggccactatgttgcacaactccagggggcaccattcaattgtggtggctctgattcatccagtagcattccttcccctagagccagacattgataactcatgtggccagaatgttgacccacccatcggagatggttaatcctgagaatttacaattctgttttcttttatcctgtctagcttctttatttttatagacatcaattcagatgctgcttgtttgggtcacattttcccaagttctttttgcttccctgtgaattcagacataaggtgtgtgttccttctgtggtgaatgaaaatggagatgaaaagagaggtgctaaacatgtatcacttttaaactccaaagagtagggtcaaggtctgtagcaggactcagcacactttttctgtaagggaccagatagtgattattttttatttgtggctcatacaatccctgtctcaacaactcaacgctgctgttacagcatgaaagcagccatagacagtatgtaaatgagcatagctgcatccatataaaacttcatttatggagtcaatttgaatttcatataattttcacgtcatgaaatatccttttttgatttttaaaaaatcatttcaaaatataaaattcattcttagctcatgggccatacaaaaataggtggtggaccataatatctcaaccgctggtctcagcctcactgctgaggataatgagtagctgtgcacaaatagttacttcatcagtgcttccccagctagggacagagctacgctcaccagtcatttagcctgctaggcagaactctggaattctgattcaacttctgccctgatgctttccagctgtgaccttgggctctagtcacacgatatcagagtctcaggctgctcatttccaaaacagtgatacaaaatttttttctgccttcttcatggcactggtgcaaactgcatatgaacgtcttcatagtctgattgctggtttcctctgtggcctccatttgcaaaaagtacattaacattttaatcatccttcaccaaacatttctggaagacctattctatgccagtctgagcccttggggatatacagatgactgagaactagaccttgccctcacagcaaaaaaaaaaaaaaaaaaaaaaaaagcaaaagaaagagaaaaagagagagagaactaggaggtattgtggcccaagtgtaacagaggagggatggaatgagcaagggtgggagagactagctctgctgggatggagatggaacagtgggagactcagcaaaggtcccccagagaaaatgccaacaaagcaggtctggggaggagggtgtcttgggatggcttgcaaagcatgatgacaaagagcagcatagagaatttgggaagcttaaattactaagtatggggagcccaccatgggtgaaggactccatcaggaaaggaggctggagagagaggatagagaagggagggagaactttgtgtgccatgttaaagagtgtggatttttttccctataaaggaaggagagtcatcaaggggtttagtcagggttataacatgatcagctctgggctctagaatattcactctgggggcaaatgtggaggaggaaataattggggggagggtagtggtggagataagggggcctctgtgataatcctgatgagcaatgaaggggagttaaactataggataatagcactaaggctaggagaacaaagatacttttagaaaatgtgtatattaaattaaaagaatattttgaaggctgggcgcagtggctcgcgcctatagtccctcggcctttgggaggtcgaggcagatggatggattgcttgagcccatgagttagagaccagccagggcaatgtggtgaaatcctgtctttacaagaaatataaaaattagctggtgtggtggcacatgcttgtagttccagctactcgggaggctaaaatggaaggattgcctgggaggcggaggctgcagtgagctgagggcgccactgccctccagcctgagcaacaaagtgagaccctcaaaaaaaaaaaaaaaaaaagaatattttgaaagcagaataatattagactacactggaaaagcatggtacttaaaggtattgaatttttttgtaagtaaataaaaagatatacacaaacacacacacaaattgtcggacccaaattccctaagtttaggtgtttgccttcaaattttcttcaaattggagagcctatgcaactgattgtcaacaaaatgcaatgcttaaaatttctgggtaactcattatagttttgatatctaaagaggatcattgacagagctttctcacagtatttattaccaaatggaaaagtgtcagtttctgctgagactttgatgaccctttgcttaaatcttggttctccatagaatacattgtgatttatgtttttgtttcagaaaaaggtccaagcatgaaggaaccaaatccaatttctccacgtaagtctttatgcaactatttcgaaataaaacctcctgggctttcctaagaatgagttggttagtgaacatttgccaaactttgagttttgataaggagacttctgctctcattcccccttcccccttcccctttcccctttttgctcatattttttcctttcctctgtcctttgtttatccctgctttctttttccctttcacctttaccactttaaaatattaatttgttgatccattggcatgtatggcttgaatgggaaggtagtaacttatttagagagacaagttaatgacttgcgtgcttatgtctgttctaacctgcaagaattcacatacagccatggaagtggtttgctttaagtcttatcaacaatatttatctgctcagaggcgtaatgctaagggaactcattgctatactttcaagacaatccgtagtgcaagggctgggggccccaggaagagcatgtaagaatgaaagagaaagcaacaccaattgctgcagaataaggacttggaaattgtctaggccaatttcattattttatgcagaagaaaatgctgacccagaaatattcctgcctcattggcattgaggcaggacttcaacctggacttcccagctgtccacccagagctcttctagataatgttgtcttgtgaggagaatttgtgaatctgtgctttttttcctttcctaagattcccaggattagtctccatggctgattcactacatttaacaatcagtctggaaagttcctttcacaaagcacttcataaaccattgtcttaagtggattattttttttaaattatggaacaatatgaactcaaacagaggcacatatggacacatatctatctttggagatttagaatagtttcattaaaaacttgtaatcatgttcaatttttgcatctgtgggtataaaaaggcaaatcatcttctaatatcagttttaaggactagattaaataggttgatggctcggttcaacttcacctccagggagctcttcccacctcttcctccacctgacttcagcaggtgactaaagctatccgcatttttcagaaggtaaatgaacacaccaaagagcacaggtctagaagagtggggaccagaacttgggagttcggatccttccagacttgttccaccacagcatactttccccgagcctttggagtgctgggctgcccaaaggtcacaggagtgtatggcagtcttcaatgtaaaaaaaaaatagctttctttacactgaagtgagttgaaaggcagggatttaatttatacagagatcactggagttgcttctgactggagcagaaagtagaaataatatgataatagtggggagatcctgtatttcccacttatattcaaaacccagagaccttagaaattgtattctacctaaaactcctcccccttggaaaccaattttaactttttataagtgactcaaagaaggtagttctcttaaatgaaaggaaatgttctatttctggggcctggaattaatttcaaatataaaaacctttgccaaatggagaaacaattggttctatttatatgttttgctgaccataaaactgacatcactccccactgggaagtatttccgttccccttatagaaagatcatggttggaaaagtgttaaaaagtaggttgttttaaatgatacaatatgaagctgttaagattaagagtttaatatgaggagatcggtgaaatgttataatccacaggaatagtttatttttattctatattctcctttctttctgttatctttcatacttgtaaatgttcacaaaaatatgtgtataaagtattctaaggtgtgtgttttctgtgcagtgtgtcatttttggagatgttcagtgaataagcagcagtaagccagattttgatcatggaagttcactttattttccaaagcatcttaacctgtgaattttcaagctaccctccattcaaatagtaggtccttagagtgagacaatgagatgacagacaagattttactgagtttgcaaatctgattttttagttagtttgttgatcaaaataaattgcaaactgagaatactttggaaacctgataatttcatttaacctttgaaaaaaatttgcaagttacaaaatacagtgtattttattggaatcttcattgcattctccgattttattagtgctcaacctttatgacagtgcttgtgaaacaaatataaaattgcaatgcatgatgcagactaaccaaaaagttgtgtgtatcggtttctctcctttatagcaattttccatggtctggacaccctaaccgtgatgggcattgcgtttgcagcctttgtgatcggagcactcctgacgggggccttgtggtacatctattctcacacaggttagtgtgactgttgagtaagagttggtgaacagcttgtgttcctgccacacaatagacactcagtgttttgttggatgaaataacgaatgaaagagaaagttcattcctactatttttacatttacatatttggtataaattgggtttcacaaaagtataatttgccataaacagtggaaagaaaaggaaggtttaaactgtgctaattgcgattgtgatgttggtgaaatttagccgctaataaagctactttgttgttagagtttaaagttaatgcagacaacgtacagaaatacaaaccattccgtcaaaaccaaagacttaaggataggcatatacatgagaggaagtgaaaaagaaagccaagattttattaccacacctgccaaggtattgagcactgtccatcagagtccttaatcaatgacttaaaccagattttctcaacctttttttaacccatgctatgtcttctttgataaaacataaaattttcatgtttttctataaagttaaattttctaaatagatttccatgaactgaaaaaaaaaaaaaaagtgatgaaacagagcacttcattttcaagctattatccctcaatcttcaaaattcagatgtgctcctccctaccaatcccaaggttgaaacatactagcctgatgagagaacctgttctgaccccaatacagaatgcaggccagcaaagggagtctttagtgcaatggagaaagaacaaatggattgtcctgctattgattctttcttagtttcctttcaactatgggcaggagtgacatgcattttgcggcattctggagaactagaatgtataaaatcggtcttgttcttgtttgttcttggatccttgtagttttatactgtgaacctagataaactgtgctagattgatccgtcagaggcaagtggcaggcccagcttctctgtttataatttcattaattgtccattaaaccaatgaatgccatgatctttggcttccccttgggccaagctgaaaggatggctgatttaaagaggaaggaagtactgaaggatattttggagagtcatatctttaccctcttgattgctagacaaaacgtcaagctgttgagaataaaagcatgacacagtgatcctctgatagttaaaagtgtcagattcaaatcagaattttcactttaaatactacatctcctgcctgaggtattttagattacgccagaaggagaggaatggactctttcatgcctagcatgggacattcacccaaaaggcaacctcttggcaaaaatgtagaagacttgaatagagagactttgagtcctcaaatgcttgttcctagtcaggatactttgagtaaagtatgtttacgtgaaagattaaaaaatgacttctcataatcctagcattttgggaggcaggggcgggaggatcacttgagcccaggagttcaagaccagcctgggcaacatagtgaaaccatgtctctacaaaaaaacacaaaaactagcatggcgtggtggtgtgcatctcttgtcccagctggctgaggtggggatcgcttgaacctgggaggttgaggctgaagtgagctgtgatggtgccactgcactccagcctgggcgacagagagagaagttgtctcaaaataaataagactccagtgtcatgattctggagtattatataaccatctgtgaatcagtttaggaggattctccctcatgaacagtttataaaaggaccagaaagacagaatttagcagagcagcattttaaagtaagtaattttgtcgcaggaataccgacatgttcagatctcaagctaacagttctttgcaacttttccaacctcctgcctggctgagaggttctagggctgttggcagcctgtgttggctgttgggagtgagtttgaaagtcctccaagaagactgggtcacccacagatgtttaccatgtgcctgctcagccactgactggccttggtcacacagctgcactctcatagctaatcttgggccaggaagccaggtccaggcagaatatagggcaaccagataatactcactactggaacatgccccactgaaatccccccaataatccagactgttacccacagccaagcacacaaacctgataaaaagcaaaacttggtggtatggcatgtattcatcctcattgaatttggaagtctgttgttactgatcctttttcccccaagccagagacttcaggagggcctttcaagtactgttaatgtagaaataggtttgtaagtaaatttaagaaaaatgaaaccaaagacctccctcctgtgatgctttccagcaaaatgaattacactgattcagaaggtaaaaggtttatagacactgtcatttgggcttaaaatccattggcatgacttatgagacagcttcaaaattactttttattaaaaactgtagcctctggttcattttatagattgctcttgaggaataccagcatcatacaagcatgaagaagactcacttcaggaccacatgatagttcttttccagaaccccttcagtttgttacctgggtcagctagcagcaatttagattaataaggaagattataatgcagtgggcaatggggagagccaggatacaaatactggctcagtccgttcaatttcaacagtgattgaagctgtggaactcacagatcgtatatgctgtatttgggggttcagatagcatctgcctctgtgtgaaaaacaatccttaatttgaataacttttcctttgtttacgctttccattccatgtgcagcacggagcacaaaaccaagtcacaaatttggattgtggatatctacttacatacctggaatgtgtgttactctacaaagactgggttcccactttatcatatgacaactctgggcacaataagagatattcccttaaggctggattaattctgtttggaaaactccattcctaaaacttacattctctcctaagatgctgtagagaggaggggtgcttgggggctgaaatggtgctggaaccatagaatgttcatgctcctaggaaccctacctagttcaggggtccctaacttctagtccatgaaggtccctaaagtcacatgcaaaatcttatctgtttttttcttgaagggaggaacaaatgcttttatttttattttctagtaaaactttttagcttcatcaaagtagtacatgcaaatagtttaaaggttgaaataatcctacaagactcattatgaaaaaaaaatcacacccctactgtccttaccttcttttctcactccccagagcattatttttggcgcttagctcatccttttggatgttaatccatacttctaaataacctgagtatattgctgctttttgactttgcaggtttacacctttgctctagacctcctgttatggaaaatgtccccttcccccaccatcctcttaatagaaatatactgacattttggttagagcagcatttactgtttacattattatgactacctaaatgctaatcacagttaactcatgtagtataatatcctgcatgacttttaattttccctagaattaattattatctttccccaccctaccccattagcttaattttcttttcttttttttcttttttttgttttgagacggagtctcgctctgtcacccgggctggagtgcaatggcgcaatcttggctcactgcaagctccgcctctcaggttcctgccattctccttcctcagtcatcagcttaattttctatgtatttatcattaattcttctgctgaccctgccagctgtctcaatctccttttaatacattgagacatatggaatgttctactgattccttttcttcagctctttcctggagcctctgacctgctcctgtctgaaccggttccctccatttctggacactgctgtcttcctatgatcttcttcgctaccattctgtgcattcccttcacttctcttttgagttgtggatgtcctgtgtcatgtatctcctgcctttcttcttcctggtttaaagcgtacagaggacgcaaatgtttttcacaccttgcatgtctgaaaatatcctcatttaacagaaacacctggtagacagtttggcaaggtacagaatgttagattatagacactttttccttcggacttttgaaagccctcctcattgtcttctagctctgaggattgctgttgagaagttcagagctgtgcagattcctgatcccttttgtatataacctgttttttctttctggaagaaattttacaatgatatctcttgagttaggtgtatgtttatacattatgctggtcactaattgggccctttcagtttagaaactcatatctttcagtactgagatttttaagaatgatttatttttttctcacccccttttttctgttttctctcattttagaaatcattttatttgaaagttgaacctcttgtcctttaattttcctttctttcctgttttccatgtgtctgctttctttattttctgggagattgtctcatctttatctttcagttttttactgagtttttaatactggcttcaaattttttaattccaataacttttttaattctaataacttttttcctgtgaatttcttttcttttaaaaaaagttctattcttgtttcatgggtgcagtatcatctgagaatattaatataggattatttaagaatgaggaaaaaaaaagaatgaggaaattctaagctgtgggtgggatgtattgattgtgaacttctttaagatgatctgactgggccattttattgatgaatccctgatacctcatcattggatctttcctctttagctcttcaggcttccataaaatatgtttttttgcctcctgcttgaaaggtataggactggctgttgaaagaccattataatgggcactgataaaaataaactgacatggcaacaaattatatttggcaaatagacaccggaaagcaaatatccagacttcccggccagggtataatcctggcgcttttcccgaatgcaaatagtgaagcgcatggcaaattctgcaggagacaaatttgttacaaagtaggactggaaccctactttcttgattcagagtttcactgttgctagatgaggcaaggccatctggctttatctccttttaggctgagcaaaagaagcccaggtgagccaaaatacgtattaatatatgtttgccgaatcccccccttttgaatgtggtactcttgccctcaaatgtgcctggtgttgatcatttctggaaccttcagtttcctcctcttaagagagtaaaattcccgtcttcttcctggattaggaagggcagatctcagcccagtggagcgagggaggaaatgtagagaactattctgcttctcatatagttcagccaacccctcttgcttatagccatatgttcaagggaggtttccagaggtgcctgatgccaccattccctgagttttttaagggttcggcgacataaattgcttgtttctcagtttttcccactgttggcttaggtttcggctctcttgagtctgccaagtcagttgctactcacccatttcctcaccagcttccaatatattttattgctgttatctttacttttgttatctttgttttcatgtgtttatgcctttaaaagtccatttactgtcattctggtaagatttgggaaaggaatgcaagtcaatgcctttaaatgcactatctctatgcaaagtcgtacccttgcttttttttttttttttttttttttaatcagtttcttaaagggagtccttggaaaattactagtctgcatcagcatttcctttttacgtagcgagaaaactgagcccagagaactgatgtgacaagctcaaagttacccaggcacagcggccaggactgaaggcttgctttcttgattcagagttcactcttttcttcctgttctgttattacaaattcaaaggtcacgtagccataatctttttatcctccttctgcttatcagataataaacattaattaacatgtgttttggtttttctttttgcctctgtttagtgtcagctaaatttttttggtttgttcactcatgtattcgttctttcactcaacttattcaatggattttttaagctattgttaaatgccaacgctattctaggcactggtaaaatagccatgagcaacagaaagtccttgctgtcgtggagttcccatatattcagaggaagagaataaccaaacagactgattataagcagattggctcaggcagaaacccagctacaggcacacatgccaacctttaggaaagcaatgacctgatgaactgtgtcagaaaaatggagaactgacaagggaagtctcactggagaaagaagaagtgtttctaatctgaagaattaagttttctattaaccttttatggaaactgaggggagggtgagaagaagggggaagggtatgaatggccagatgctccgggaggtgctttgttttttgagagaaaaagacacaccaatagacaccaggaaagccgaaggcattcatcttaacctctgtgtttaatggttttataaaataatgatatgggcatttgagtgaaaagagagtggagcctgccttctttacagtcacattggggtttccgtctgttccagctgcatctgtctgatccctgggacttggtctcttgcctcctaccttatcacaccttagtctgtctgcttgctgtttctcttttcatcgggctacacttgggaacctggagaaacctcaggcctctgaacacattggcacctcccgagctacttctaatgaaaacctcttacctgacttgggtggacttttgggtatgcgcttgacttttgctttaagaacacatggtgtgttccatggagggttgttgaaaactgcctgatgagttgggacgggcacacctaattcaaaacttcagcattttattatgctctgtgaaacagtgttccttacacgcttagattttttttctgcttacacatcagagcagccttaaagttgaaaaagcttttattacgcatttcttgttttaagtacgctcaccctaataaccctgtgaagtagtgattatctctgtgttgactaaagggaaacacaactaatacacctactaaggtagcaagtctagccattgaacaaaccagagcttcaagtccagtttctgactcagggttgtagcgatagctgtggaggacagccttcctcctccacctgatttctctttccctcttgcttttcttcttcttcttagttattatcagattttgcatcctattcaggggccacaaaggcagggaagataccacagaaaaccaaagtccatatacaaacaggttggccacactgcaggaatatagaaagaaagtagtaggcaggacattgtgaaaaactttaattcttgatatagtcttttccccgtgacttctaacaacatctaactcacccctcctggagaattttgctgcaaaagaagagtcttttgtgtggaggctggggaggaatgaaatttgaaaatgataaaaagtgattgaagacttctctaaattaaaggtagtatcgttcactctgcttaaagagtgagcttgtgaattaattacagttaggagatcaagaaactgagacattaattgatagaaaatcgcatccaacacgtagatctagaagaaaatatctttattttctttctagcatcaaggaatattaaatctaaagtgtccccaggtatatggttttcaatcctgtgcttaaatatctcctgagaaggagattccataaattccctctataactaaccaatcctcataatcagcaagttcttttctatctgatctaaatccctagtcctgccatttaaactcatttcctcatgttctgccctccagggagataaagaacagctgtctgctcctatttgtaataatcctcatggagagtatttgcaatagtctcctttggcctaaataccaagcttgccctcacctttctttttaactcttctcttgtttccccacagagtcctcccatgctattcacatctttcttgaatagtttcttccccaggacctgccatggtgaaagacttagaaataagaatacagttgtaatatagacgccaaagaggtagcaggaagtcagatctgggcaactccatgccatgctaaagaaataaaacattctccattaagaaatgttttttgtttgtttgtttttgcttctttttttcttcttccccctggtagagacagggtctctctctgttgcccaggttggagtgcagaggctcttcacaggtgagatcatagctcactgcagtctctaactcctggcctcaggagatcctcccccttcagcctcctaagctggcactgtaagtgactgcacctggctttgtttttctatttcttgaggcatctctggcagtatctaggcccagccataggctaactgtgagatgggtggaattaatccttagtgtccttatcctcagtgtactctcctcctccagagtatgtcaggcaccaaattcctctctcccctactcactctccctcctctcaaatctctgttccctcaatgtggtttgatattttaggaggaaagcaggaagactgagtacatttcctctgctggccaagtctgatatttatttacaagcaaggcgccctccttgaatttcttagatgtgttaattgggcctagtctgcttagccacgaggtcctccctgcccatctcctttaggagcagccttgttatacttgtcacccaagggatgttttagagaaagttggtgctccacgaaatcagagaccactgcagtggagagcagacagccaaagacccatctcagaaaacccaggggtctctgttggcccattaagtagaagcatctgtacattcaactttcttcctcatggtgaatttttctgtagcatcacttccatttgacagtgaaaaaactttttcttaatctgtcaaaaggtaagagttatttttaaaacatggttatattgagaaaccttgcatcttacatgtgaaaatagccacagaactggaaaggatggtctgaagaggggactttcaatatttcccagcagattctcagacagagactcaccttggcccattattggatcaaagtcaatataatattaggttaacttgacttatccagctggtgagatgcatcctgcagtcttgagtgcggaggcttctttgttttgtttggggttttgttttgaagtgttttgcattaccagaacaagagttcccaaaactcgggaagttgaaaggtctctttaatgggcacggatgaaaataaactgacatggcaacaaattatatttggcaaatagacatcggaaagcagatattcaggcttcctgggcagggcatagtcctggcacttttcctgaatgtgaataatcaagcacagggcagatcctggaggagcacacttgctccctattgcttgatgaagcaaggccttctcttttacctgctgttgggctgagcaaacaaagcccaggtgagccaaaaaagaaaaagatggagttggcctcctgcttttcagatgtatccttattaaaataggaaaaaatatttttaaaatgtggttcatgcatagccacattagtccttctgattgattatgtgaggatccagctgggtatggaccaacatgtggtttgtaagggagtcaaattcttaaagtatatctagagttgtttgggtctctggaggttgtttttgttttgacctcagaatagttaagagatttgattcccttctagaaataaagctcctactctggggaaagtgaatttttggcagaaagttattgccatggaggctaatttccccagccttaattatacacacacatgaagagtagagggcagtgctggggagggtccaaaacataggtttccaaaaaagtcaaaagcagtgtttcagccgggcgtggtggctcacgcctgtaatcccagcactatggaaggccaaggtgggccgatcacgaggtcaggagatcgataccatcctggctaacacagtgaaatcgtgtctctactaaaaatacaaaaaattagccaggcatggtggcacatgcctgtagtcccaggtactcgggaggctgagacaggagaattgcttgaacccggggggtggaggttgcagtgagccaagatcatgccactgcagtccatcctaggggacagagcgagactccgtctcacaaaaaaaaaaaaaaaaaaaaaaaggcagtgcttctccgcttctcaggaatattgaccccagtcccctatccatcccgccaatcccagaagaaaagataattagaggaagtacaacaagggccaaacttacaacaagcacataaatactttgaggttgatgcaaaagtgtgtatagctgtgtggttcatgaaaggggtgacaggaaaagctgtaaccagacccagggacatgagccagttctacattttgcagaactgcttttttcacagaggcttttgaggggccccagaaagagaatggaagtaatggggccaagttcctgcactggagggcagggcctttcctcgagtgttttgttttaatgaagcagctggaagggttgcttatctccggctgatagatgtgtatttcagcatgacaggaaagaggaggctcattcataaacaggcctggccctctggggtttcccacattgaaggaggggatgctgcttacaagaagtttatgaagtttatgctctgacttttcaaagtaaatgcagtgttttttattggagagccctgatcgcttttccctacctagagccattttttgagggttgcactgaggccggttttgccgaagagaagactaactctagggccttttgcactgttaaatgcaaaccatgtgtgtgacttgaggtttccttcctctccaaagcactgcacatttggcacgatgaatggctttagctaaaatgcagtggggtgtgtaatgaaaagtgggatgcttaaagtgttaggagatactcacactgcaccccacagggaacctcagtggggaagagaggccattcgctggcaactgcagtccccatgtgcaaacagctaaaccccttccccaaaaggtttttccaatagcagctatcccccaccccggtttctcaggtaatttatctgtttggcacacaaggctctctctactgtagctaggacaaagtctatatttcactcctgtttttaacaagtgcattcagaacaaggctcccaaacttccagggttctcttaactacaattgaaaggtcacaccctccaaatcctacagtgtctttatgagagaagatggacagtgtttcctgaatacaggtgctggtcagttgccagctcacacagaccaagtggtggtgatttcatcaaaggttgtggaccctgaaatccagggactttgtcatcaactctcaggggtcttagccactagagctgcctgtcagtcagctgtcttctttttcccattcatgatgctttaaaaataaaacaacaaatagcaaaaccttattttagaaggtattccagccatctaggacctagtctagttgcttctgccctggttgagaaaaatatcagttaaaatggcaaatgcggaataaatgatcttttcaggaatgcacatacataatatgcgtctttctctgactctgccttttctttattaactgcaggggagacagcaggaaggcagcaagtccccacctccccgccagcctcggaaaacagcagtgctgcccacagcatcggcagcacgcagagcacgccttgctccagcagcagcacggcctagcccaacccagcccaacccggcccaacccagcccagcccagctcagctcagctactgccaagggcaggaccaatggctgagcctcgtgtccagactcagagggctggattttggttcccttgtaaagacagagtgaatttcagtataaagatcacccgttgtattcaccccacacccagggctagtataaacatgaccctgggcttctgtaccacactagaattcatgtgagaaagctaaaatggtggtcttctccaccagcccctcacaggcttgggggttttcaatgtgaaacacatgccagtttttaaaatgctgctttgtccaggtgagaacatccataatttggggccctgagttttacccagactcaaggagttggtaaagggttaatagccagatagtagaaccagtgaggagatgcggccaaagattctttatatctgaaccaagatgtaaaacaagaaatgctttgaggctttctaagcgatcctcctgtctaatttgcacctttgtctggatgcacacttctgaccttgctgccacaacctgtggggtctgatgtgtcccttgatgggtgctgccctcagggactgcaccctgacaagtgttaaggcaacattcctttcttgtgccctgggccaaaaccaatgctgatgaccttatcagcttcctgtttcttcccatacttgcatacaccactgcaaaatgtcttaatgcaaattttgtatttcttacaggcctacagaaattgaaaatgaccaaaatcaggaaccacagatttgtgcccattcctaatattttgttctgcaaattaatgtataatttgaggtgaaattcagttataaagtcaaggacgaatttgcacagtgatatatttctatgtgtatgcaagtacaagtatataatatgtcacctggcacattcattttctcagttgaagaagagaaaatttgaaaatgtccttatgcttttagagttgcaacttaagtatatttggtagggtgagtgtttccactcaaaatatgtcaacttaaaaaaaaataggccctttcataaaaaccaaactgtagcaagatgcaaatgcatggcaaatcctgtcggtctccagttggttatctgaatagtgtcaccaattccaccaagacagtgctgagattggaaaagggcactcatttggattgccttacttctcttgccttaaatatatcccatatatttaatatgtcaaaaagggcttgaggtgaatttcattaaatggaataatatgatgccactttgcagctaaaataagctcagtgatacctccttgttaaaaaaaaaaaaaaaaaaaaagaatgccaggggggaattatcatgctaaattattttactgctgaagatagcttcattgcaaattattctttttccagaatttcccccaaacaacttagaattccataagtagaacaagatagattctacccccaaaatattcataagcaaatcccactgcccttaaaataaggaagttatgcctggttgtctgtgaatggaacctcagtaggtaatcctgatgaagcttaaaaccttagggcagtgtctacatgggaaacaagtatgtggaaattgacaatcatttttaccaaatcgttgagtaataatatgacttacctgatagatatacacattcaataaggaacatttttttttttcaataaggaacattttaactaaaacattactttagggctgagatttccaggctatctacattgatctactgaaaaatttctagatttccatatacaaacgaagaagacatgagtttagagaatttttttcctttaatttttttttaacagaagggtatcagagtggaggacctagattacgctacctgtgtttgaaaatattgcgctttgcctaaccttcggtggaatgtattgtttcagcatattctatgtataaaaaagtttaaagatgtcttcaaagaagactagagtctttaagtcacttatagctatattttactacaaaatttgtgtataaagatatatttaagtgttttagataaatttaagttactccatatgaaatgtttaatttcagctactgtgaattctttcgatcagtcctttgcttttttaaaaaatcttttccatcgtgttaaaaagaaaattagctattaggagatattaaaagattgatgtcttagaaggacagggttaaaaccttctgtaatatatttaaatatatatttttaagagagatgctacattgccaatgattttataaataatttaaaattaatttacaaatttatagatgcaaaccaaaagatctttttaaaagagagagagaggaaaaaaatcaccttttatttgtttgggtctcattgtcagaattattattcagatcaagaaatctgtgtcgataaaacctaatctcatattggagagtgaatgtcgttaagtatttctgaaatgtttctaaaaaatgaacatgaaaaaaataaggtattttctccctagcttctcattacagtatttctaattgcttcacactttacagttttaatacaaagtacaagctctacttttataacgtgtactacaagtttctttaaaagtattgttgtatttcagctgaactcttgtatctgcagtcttttgttatttctgcaggctacacccttaatttgcagaggccattttgttgtttgtttgatgctgaagctgttgttaaaatgccccaaactccaaggcagattgtctgtataatacgctatagcttttcaccatgtggtgtttaccagctgttactctgtattttaaaaagccagagatttcttctgtctaaactgtttctatagcattttctaaacaaaaaaaatggtttttttctttgccttgtaataagattgtaaatccatttcctgcttgtgttcttagtgggcatgattgtgagtgtgtgtggggtgctcacacgcgtgccagtctttttgtactgtaactacctcatggtttgaatgatgattgtactgctggttgtgttaacagagcacattttgttgggtgagtcctatgtgatttttttcatgtttgttttatctgggggttgttcatgaaactgacagatgtttttctaaaaaggactattatcagtttccaaatacaatacttctctcttctggtttttcctgaatgagcctgattttgttgctggttttcatcatctatgagggtaaaacgagtacccttaaaatccctgtggccagtttgaacacccctgttgtattcttttctctgttcagtgtgtcagctattttgtgaagatgcttagatgtatagttttgataaccacagttttaaatcttttatctgtgcataataaaaagatatatatcagttattaatatgtgtcttgttatcattaaattctaccctaaggctcatgtaacttttttcactgtgactttctcctgaatggatcgtctgctccgtgttgatgaggaagtgggaggagaaaggctaagaggtccagagcagagggaagggcggatggactagaagaagagtgcagcaggagctgtcgctcttctcagaaaaacatggcaggagacttggaagtgggtgtctcaccctggaaaccattcctgggccttctgtcaatctcccagagtcaaagaaagaaacataatatacatttaaggtctactattttcagccccttcaaataccccattgctgcttccagcattccgtatctccatatggtaccaccgtcttccagttgtccaagccagaaacctgggaatctaactacagcctctttggctcccctcttcccaaatcaataagtccgagtgttattctacctctaaaatgtctctttcttcaaaccactgacttattcctactctgactgttgttacacactgctcaagagccattgtctcttgagtcactgcagcagcctcctaactggtatgccgactttccattttgctcccttcaattctttctccaccatgcagccaaagtaatcctaaaaagactccattttgaggcctttaggtaattgccccatttgccttcaggatacagttcagattcctaagcatggttccgaggaggctaatctgcctgctttcccagctacttctctcacctctccggagctcagttctatttggcatcctcacccccagacaaatttgtaatgaaaaaagttctcgttcagtatcaaatattacattacagcattgaatatgcatttacaggccacactccccttttgagatttttagtgactcagatgatttggcatcaaggccagcagcccatccctcacatgttacacaggtgggtacccacagagccggaacagtgttaagctccattttacagctacggtgccccctgcaaccagctcctcttaggatatgtgggagtaattggcaggtcaatgaattttttttgccattaaactctccttgtgtctactggagtcaaaacctgggtgattaataaatgggcttcagagagtctgtgaagtggctggaattgtatgtaggattttattgcagctatgtctcggctgttgtttttggtgagagtccataggctttttgtaagaaaaaattatctttcttgttcacacaatatatatatataaaatgaatgcaaagaatacagacatgtagcaatgaaaaggcctccataatcctccaacttgaatataagaataccgatttagtgtatgtgttcccagatgtttccttaattcatatcaacatgtccatgtcattaaataagattggattatggcccggtgcagtggctcatgcctgtaatcccagtactttgggaggccaaggtgggtggatcacttggggtaaggagttcgagaccagcctggccaacatagtgaaaccctgtctctactaaaaatacaaaaattagcggggcggggtggcatgcgtctgtatcccagctactcagaaggctgagacacgagaatctttgaacccaggaggtggagattccagtgagttgagatcatgtcaccgcactccagcctgggtgacagaggaaggccctgtctcaaaaaaaaaaaaaaaaaaaaaattggattataacagttgtgacttgcttttttcttttttcttttttttttttttttttttgagacagggtctcattgtgtcacccaaagctaatttttatattttcagtagagatggggtttctactaaacccaaggcaaatttttatatttttagtagagaaaaggtttcaccatgttggccaggctggtctcgaactcctaacttcaagtgatccacccatctcggcctcccaaagtgctgggattacaggcgtgagccaccacgcccagcctgtgacttgcttttttcatatggcatatctttctcagggctcctaagatgactgctgatcatcatcattttcttattaggcttaacttaaattgcccaaataaaaatatggttctcataggaagtgaaatacaaagatatttgttaacgctacccttcctactccctccagtcacttacctagaggagctgatgttaacagccttttttcaaactcaaacatattgaaacgtgttcatgaatatagaagtttttgtttcgtttactaaaaatgggatcacaatatacatactctgcaacttgcctttttcacttaacatcgacctcctgtagattattagatacggaacaaatttcatgttttttggtggctgcataatattttttacaatgaattcagccaattcactagtaatgacattttagttttttgccaagatattctgctgcagttaatatccttatatattatgttctcacactccaatgctttaaagcaaaaaaaaaaaaaaaagtgacagaattataaaaattataaagaggaaaaagaggaactgacaaattcatcacagtaggatattttaacatatcactctcagaagttgacaagtcaaaaatatttggatatggaagatttgaacaatgtaattaagcttgattaagatccatacatagaatcctgtgtccccccaatttgacaattttgtatataccactcctggaactataatggcattctcagcaaatatcacaaaatttaatcatactgatcaggttacttaatcacaatgcaaatagtttaaaaatgaatacgaaaataatttttaaatactcaatacatttaggaatttaaaaacactttacagccgggcgcagtggctcacacctgtaatcccagcactttgggaggccaaggtgggcggagcacaaggtcaggagatcgagaccagcctggccaacatggtgaaaccctgtctctactaaaatacaaaaaaattagccgggcgtggtggcgggcgcctgtagtcgcagctactcgggaggctgaggcagacgaatcgcttgaacttgggaggcagaggttgcagtgagccaagattgcgccactgcactccagcctggtgacagagcacaactctgtctccaaaaaaaaaaaaaaaaaaaaaaaaacaaacactttatatgttctgacaatcagttaaatggaaaaaaaaaaaccaaaaacacttctaaataattcatggctcaaagaagtcataatgaaaattggattgggaggctgaggcgggtggatcacctgaggccaggagttcaagaccagcctggccaacatagtgaaaccacatctctaccagaaatacaaaaattagctggggatggtggcatgggcctgtagtcccagctactcaggaggcttaggcaagggcatcacttcaacctgggaggcagaggttgcagtgagccgagattgcgccactgcactccagcctgggtgaaagagcaagactccatctcaagaaaaaaaaaagaaaaagaaaaaagaaaattagaagattagacttgaacagtgaaaatactacattcaaacatgcggctaaagcaggtaacttatgagaaacttaaattgctctaagttgtacattggaaaaaaaagattgaaaatgtaacagtatccaacatggcaagttaattattactttaaaagactattggagataggtaaaaattaagtaaaagtaaacacatgcattagaagataaaaaaagacacaacagatatagcagaaattttaatcaataagggatcatcataaactttattttaataaattagaaaacacaatgtgggtgatgtgtcagggacagtcagagttctgttgggtaaacaaaaaccactctgattatttcaacagaaagaaatgaacgtgaggacttggtgtagcagatgttgaagggctgaaaaggtgaacagagattgctgagggcccagggcagggattatcagagcgggaagttgagcgtggcttgcccagtcccactaccagcatcatcaagcagatagggagctaggagacaaaaacttagtggatggcactgatgacttcctagtaaaaatgcaatgttgcaaaactatttcaagaagcaataaaaattgaaaataaatctttaataaatctttacatttaagaaaagtaagatctaggaggcttatgggaaaaataaaataaaaaataaaaagtaaaaactaaattaaaatctactcacaacaaaatagaacacaaaatttaaaacaaacaaacaaaaaacaccaccaagcccagctggttttacaggtaaattctaccaagtagtcaaagaacagataatgccaagatcctggtgtttcttttattcctgggatggcaggtcaaagagaatgagttttttatattaatcttaatatttattgccacattactttctctaaaggtttttgaaaatcacgccatcactacaggcaatgtatgagtgcccattccctggcttcctcatcaacattgcctacgttgaaacagaagtttgggctctaggcatcagatttaaatcttggtgctaccatttgctaggtgaactgtttccgtgatattaaaaaaaatctacactttagcattgttgtcaatattaaatgagctagtccacataaagttcttagcctatactaatcacttaataaatattacccactattaaattttgccaatctgatggttgaaaattgtatctcatttggatttgtattatctgcaatgactaagttttaaattatcatatcagtctttcccaggttctcctataaatttctattttctttgcccatttttctaatgaattgtctttctcttaatgatcgtacattagtgaaattctgtttcacatgtcatgtatgagaaatattttcccagtctattatggtcttttcattttgtttctaattgatattgccaagactaaatgtttaattcttatgtagttgaagatacatatcttttccttttggcctctgggttccctctcttgcttagggtttctctgactctagatatatactaatacttttaaaattttatttttaaaatgtaggtctttatccatacttttgtgtatgatatgaaggtaggggtctatttttgcttctttccaggtgattattcaattctactggaagcatttattaaaaaatgaatttattaaaaaaatgaatttattcaattcattcacttcccattgaattaatacttttaaaaagaattgtgaggtagtctggccttagcacatatagtataaaatcatgtaataaaaataatatgatattagcataggaatagttaaatggattactcaaacagacaagtaaaacaaccagaaattgatctaattcattaggcccttacatatggcaataagtcatagttttcattagattcttacaagagtctgtgatccaaaaatgttataatttcatgacctaaataagagttgtgagttgtctgatttttattgtaaaaaaaaaaacacagatgtaatttctttccctgttatttcaaaaaaagagagagagagagagagagaaaaaaaagttgtctagtaaataaaaagcaaatcaatgttaggtctatcccaaacttttcatggttccacacagtattcttgataatttgctgctcttcctcctcttcctccctccccatgtttatggaaaaattaatattccctaatcaaacattatttataaagtgttggtttcatctagccacttgtgaatgttataataattctgtaaagtgaagaaatgttaccaaatgccaaatataggcatcttttttgtttcaaagcaagccaaacctatagcattgttcttccctaatgcaacatgtttgaaaatgggcaaatggccggattaatttttatagatgtcattgataatcaaaagtttgagttttggcatatttgctgcccttgttcttagattgccacctcagctttttcagaggaactcaacactgtacttaatgtagattcgatttcacacttaaaataaaggtcatcatatgacatcacctccccttactcagaaggtcacagcttgaattaatttttaaagattttctgcatttactgcctctgagaattcattaaaaagaaaaaaaaactttaaatgtagaaccacatgactgaagtgaactctatcttgacttaaaaagaaatgaggggtgggagtgtgagtgtgcacacacacacacacacacacaaccctcagccattttcctttctattttattaacatattatcaatattttctttctgctcagaagccccagaactgattatccttttatcaaccaaagcacaccacctgtgcaagaaaagagggaatggacaaggagaacaagaatttctcagctttgaaacccaacttggttctttccacttgaccaatcaaagactcaaagctgaaagtcttcataagtgatttgggtggagcagcttttgctggtctgttacttgtcccggttcataaactgcctatgacatagtttctgcaaagaacacagtgtacttgacaacagtgttgaaataatgctgaatttttaaaagggaaaatcacatggattctgtatggtgcaggggtggtgtaggaagggagaaaactaattttttttttttccatgagataggatctcgctctgtcacccaggctggagtgcaatggcagaatttcggctcattgcagccttgactttctggtgattctccttcctcagcccctcaagtagctgggactacaggagcctgccaccatgcccgtctaatttttgtgtttttagtagagacggggtttcaccatgttggccaggctgttcttgaactcctggcctcaactgatccacctgcctcggcctcccaaaatgctgggattacaggcatgagccaccgtgcctggccaatttttgttatttaaacccaaaaccatacagcataccccaaaagtggaaactagagcttcaagaatcttcatctgaaacacaaacttcttctggagcaccactttttgataagtacagcaactgcagaagagactttccattgaggattccagttatcaaatctttttcttgagtggagaggagaggtgaaaataaaaagcttcttagcccgccagttagccttaaaagtggaagcacctggaggagcatccaacctgcactccagggaaatccaccacgctttacctttccaccccagtgagtgatccaagagaaggtaattacgttattgcgccagcaaaggaaaaagcgacaaatctttaacccagccagccagccagtcctcattttgactggttgatttttttcacttttagtgtatttctcagaatgccaatgcatgtgatagaaactctagttactgcaaggaaacagtcacaggaagtgtaggaagcagttaaaagaagcatatgatgggaaatagaggatttggtttcaagttgtttcatggccctggggctgagctgagttgcaatggagaaaaactgaaacaactgtgagcagagagacccaaccagttctcagagcagagccccccactgcctcctggcccctggccctgcctgctccattccttcctctccatctgcaaggccttctcatcacctcctcagatcctagagtccttcacagctctgctaacaggcagtcttttccataaaaccctatgaactgccccagctgttattttatcaatctctggggtctggtagcaccatgccacctcatgactcaagacacaaaactgttatttttctctaacctcccgcagccaatccatcagtgagtcctgatggcttccaaacatatctgctgctctccatctgcaccaccaccacccgagtct

SEQ ID NO: 463 - DNA, 4217 bp, Homo sapiens
tctttaagatttgtagctactaagaaagaaaggagctttttttccttgggccttcaaactgaaagaaccgcatgagcctgaagctgcgcatggtcttaacatcaggctgtgcaggaagaagctatctgcagatggatgccagcacacacaaggaagcagagctctggcaacattgagtcaaagcaaggacacaacatcagagggacggcagagaatccttgtgtgtagatctttggtggcagtttgaaaattgcaaggagggactttaagactacttctgatttgcaaagattgtctgtgctctgagcaggctaaagtgactggacgagacgcactgttggagaaataaaaatgacttcccattatgtgattgccatctttgccctgatgagcttctgtttagccactgcaggtccagagcctggtgcactgtgtgaactgtcacctgtcagtgcctcccatcctgtccaggccttgatggagagcttcactgttttgtcaggctgtgccagcagaggcacaactgggctgccacaggaggtgcatgtcctgaatctccgcactgcaggccaggggcctggccagctacagagagaggtcacacttcacctgaatcccatctcctcagtccacatccaccacaagtctgttgtgttcctgctcaactccccacaccccctggtgtggcatctgaagacagagagacttgccactggggtctccagactgtttttggtgtctgagggttctgtggtccagttttcatcagcaaacttctccttgacagcagaaacagaagaaaggaacttcccccatggaaatgaacatctgttaaattgggcccgaaaagagtatggagcagttacttcattcaccgaactcaagatagcaagaaacatttatattaaagtgggggaagatcaagtgttccctccaaagtgcaacatagggaagaattttctctcactcaattaccttgctgagtaccttcaacccaaagcagcagaagggtgtgtgatgtccagccagccccagaatgaggaagtacacatcatcgagctaatcacccccaactctaacccctacagtgctttccaggtggatataacaattgatataagaccttctcaagaggatcttgaagtggtcaaaaatctcatcctgatcttgaagtgcaaaaagtctgtcaactgggtgatcaaatcttttgatgttaagggaagcctgaaaattattgctcctaacagtattggctttggaaaagagagtgaaagatctatgacaatgaccaaatcaataagagatgacattccttcaacccaagggaatctggtgaagtgggctttggacaatggctatagtccaataacttcatacacaatggctcctgtggctaatagatttcatcttcggcttgaaaataatgaggagatgggagatgaggaagtccacactattcctcctgagctacggatcctgctggaccctggtgccctgcctgccctgcagaacccgcccatccggggaggggaaggccaaaatggaggccttccgtttcctttcccagatatttccaggagagtctggaatgaagagggagaagatgggctccctcggccaaaggaccctgtcattcccagcatacaactgtttcctggtctcagagagccagaagaggtgcaagggagcgtggatattgccctgtctgtcaaatgtgacaatgagaagatgatcgtggctgtagaaaaagattcttttcaggccagtggctactcggggatggacgtcaccctgttggatcctacctgcaaggccaagatgaatggcacacactttgttttggagtctcctctgaatggctgcggtactcggccccggtggtcagcccttgatggtgtggtctactataactccattgtgatacaggttccagcccttggggacagtagtggttggccagatggttatgaagatctggagtcaggtgataatggatttccgggagatatggatgaaggagatgcttccctgttcacccgacctgaaatcgtggtgtttaattgcagccttcagcaggtgaggaaccccagcagcttccaggaacagccccacggaaacatcaccttcaacatggagctatacaacactgacctctttttggtgccctcccagggcgtcttctctgtgccagagaatggacacgtttatgttgaggtatctgttactaaggctgaacaagaactgggatttgccatccaaacgtgctttatctctccatattcgaaccctgataggatgtctcattacaccattattgagaatatttgtcctaaagatgaatctgtgaaattctacagtcccaagagagtgcactttcctatcccgcaagctgacatggataagaagcgattcagctttgtcttcaagcctgtcttcaacacctcactgctctttctacagtgtgagctgacgctgtgtacgaagatggagaagcacccccagaagttgcctaagtgtgtgcctcctgacgaagcctgcacctcgctggacgcctcgataatctgggccatgatgcagaataagaagacgttcaccaagccccttgctgtgatccaccatgaagcagaatctaaagaaaaaggtccaagcatgaaggaaccaaatccaatttctccaccaattttccatggtctggacaccctaaccgtgatgggcattgcgtttgcagcctttgtgatcggagcactcctgacgggggccttgtggtacatctattctcacacaggggagacagcaggaaggcagcaagtccccacctccccgccagcctcggaaaacagcagtgctgcccacagcatcggcagcacgcagagcacgccttgctccagcagcagcacggcctagcccaacccagcccaacccggcccaacccagcccagcccagctcagctcagctactgccaagggcaggaccaatggctgagcctcgtgtccagactcagagggctggattttggttcccttgtaaagacagagtgaatttcagtataaagatcacccgttgtattcaccccacacccagggctagtataaacatgaccctgggcttctgtaccacactagaattcatgtgagaaagctaaaatggtggtcttctccaccagcccctcacaggcttgggggttttcaatgtgaaacacatgccagtttttaaaatgctgctttgtccaggtgagaacatccataatttggggccctgagttttacccagactcaaggagttggtaaagggttaatagccagatagtagaaccagtgaggagatgcggccaaagattctttatatctgaaccaagatgtaaaacaagaaatgctttgaggctttctaagcgatcctcctgtctaatttgcacctttgtctggatgcacacttctgaccttgctgccacaacctgtggggtctgatgtgtcccttgatgggtgctgccctcagggactgcaccctgacaagtgttaaggcaacattcctttcttgtgccctgggccaaaaccaatgctgatgaccttatcagcttcctgtttcttcccatacttgcatacaccactgcaaaatgtcttaatgcaaattttgtatttcttacaggcctacagaaattgaaaatgaccaaaatcaggaaccacagatttgtgcccattcctaatattttgttctgcaaattaatgtataatttgaggtgaaattcagttataaagtcaaggacgaatttgcacagtgatatatttctatgtgtatgcaagtacaagtatataatatgtcacctggcacattcattttctcagttgaagaagagaaaatttgaaaatgtccttatgcttttagagttgcaacttaagtatatttggtagggtgagtgtttccactcaaaatatgtcaacttaaaaaaaaataggccctttcataaaaaccaaactgtagcaagatgcaaatgcatggcaaatcctgtcggtctccagttggttatctgaatagtgtcaccaattccaccaagacagtgctgagattggaaaagggcactcatttggattgccttacttctcttgccttaaatatatcccatatatttaatatgtcaaaaagggcttgaggtgaatttcattaaatggaataatatgatgccactttgcagctaaaataagctcagtgatacctccttgtt

SEQ ID NO: 464 - protein, 844 aa, Homo sapiens
MTSHYVIAIFALMSFCLATAGPEPGALCELSPVSASHPVQALMESFTVLSGCASRGTTGLPQEVHVLNLRTAGQGPGQLQREVTLHLNPISSVHIHHKSVVFLLNSPHPLVWHLKTERLATGVSRLFLVSEGSVVQFSSANFSLTAETEERNFPHGNEHLLNWARKEYGAVTSFTELKIARNIYIKVGEDQVFPPKCNIGKNFLSLNYLAEYLQPKAAEGCVMSSQPQNEEVHIIELITPNSNPYSAFQVDITIDIRPSQEDLEVVKNLILILKCKKSVNWVIKSFDVKGSLKIIAPNSIGFGKESSMTMTKSIRDDIPSTQGNLVKWALDNGYSPITSYTMAPVANRFHLRLENNEEMGDEEVHTIPPELRILLDPGALPALQNPPIRGGEGQNGGLPFPFPDISRRVWNEEGEDGLPRPKDPVIPSIQLFPGLREPEEVQGSVDIALSVKCDNEKMIVAVEKDSFQASGYSGMDVTLLDPTCKAKMNGTHFVLESPLNGCGWRWSALDGVVYYNSIVIQVPALGDSSGWPDGYEDLESGDNGFPGDMDEGDASLFWEIVVFNCSLQQVRNPSSFQEQPHGNITFNMELYNTDLFLVPSQGVFSVPENGHVYVEVSVTKAEQELGFAIQTCFISPYSNPDRMSHYTIIENICPKDESVKFYSPKRVHFPIPQADMDKKRFSFVFKPVFNTSLLFLQCELTLCTKMEKHPQKLPKCVPPDEACTSLDASIIWAMMQNKKTFTKPLAVIHHEAESKEKGPSMKEPNPISPPIFHGLDTLTVMGIAFAAFVIGALLTGALWYIYSHTGETAGRQQVPTSPPASENSSAAHSIGSTQSTPCSSSSTA

SEQ ID NO: 465 - DNA, 92076 bp, Mus musculus
  misc_feature (1)...(92076): n = A,T,C or G
tctcctggctcttctcccctctcttcacacagtctggccatgctcactccggacccttccagatgtctctggctgtactcttcctcatatctgtctacaatgaaccttcacctcaacctttagagcagttctagcctcctttttatttctttttttttttccattcagttgggagccaccgtgtgtgctgagagccgaatccaggtccactagacgatccgccagtgctcttaactgctaagccatctttctagcccataaaatccatttttaatggacatggaacatttggtatgatggttataatttcactgttccactctcctcctttcctccacccccctcctcttccttgagaaagaggctcattctgcccagactgacctgaaattcacaacaaggctcccctttaggtttttttggaatcacaggcacaggcactaaacttagctttgaccaagcttgttattggacatctagttttcaactttttaaaaaaagattttatttatttatttatttatttatttatttattgtatatgatgagtacactgtagctgtcttcagacacaccagaagagggcatcagatcccattacagatggttgtgagccaccatgtggttgctgggaattgaactctggaagaacaatcagtgctcttaactgctgagccatctctccagccccctagttttcaacttttaaaaataactttgcagtgctgggaaaaatggctcagaagttaagagcacttagctgctcttccagagatctgggttcaattcccagaatccatatggcaactcacaaccttcttaactccagttccagggatctgataccctaatatagacttatatacaggcaaaacaccaatgtacaaatatacataaataaaaatacataaattaaattaaaacaaacaaatttgccagtgcagtgatattggttggttagcattttttaggtatgagggcaaggatggatgctctttttttaatcctcctggcagccaagtcctggaagtctggtgccctgttggctctggtcagccttctgagctggtggcttccaaggcagtgtgctggagatgtgcttgaatctgagagaagcaaactggaatccagcgtgtggcgttcccaggccatgctgggctttgcctttcttgatctttgtttcttctctagcagacaagctctagagagaatggtcactggctgattttcctgcttggaggttctgtgatttcagaccatcttctactaagccaggggtttctccatctgatcatgcccttcctcataggcgtgtgtgtgtgtgtgtgtgtgtgtgtgtgtgtgtgtgtgtgtgtgtacacgcctgagcgtgtgtttcagtttctattcttagcagggtgatctttaaacaaggaatagatttgtgcttctgtctcatctctggcgcatgcagctcctgctgggttgtttcacgctcagccattcattcacataaaaagcaatagcccattaaggaaatgagaagacaccctccttcttccactgggatgggcccgacagctccctgattcgggaagcagggcctggctctctttcgtcgccaagcctggactttatctgattcagtggtagatgagatcagaggaatcttggtttctgtgcttccctgccaggtccacctttagatccgttctctggggcgggtcagggctgctgttcggtcagtagcagattttcatggtactgagtaagcgggcattccaaaggagggggtcattgtttattctaaaataaaaattgggcactgatgagtctctgccactccaagagttctcacctgtgacagtttctcagaataactttggatatttaaataaacaaattcagattctgggctcccagccttagaccttctcacttagcagggctagaggtagagcctagtttcttcatattcaaaactctaaaatgggctgtgtatagtggcacatgcctttaatcccagcactctgcctggtttgtacagtgagttctagtctagccaaggcaacaaagtgagaccctatcacaaaacaactatagcaataacaagcccactaaaatggaggctggagagatggctcagtggttaagagcacagactactcatgaaggggactgggattggttcccagcacccaagccaggtagctcacaactgcctataactccagcaccagggaacctgaggccttcttctggcctctttggatacttgtacacatgtgcatacccacagtggcctacttcctccaacaggccccttctccagaactttctatcatcacctaataaagccatcacgtcatgatcccattagggagttcactcttttatttggctgtcaacttcatgattctagcagctggagatctagtcttcaacaacacaccagtcttgatttctttgtttgtttctttgggttttttgtttgtttgtttgtttgattgattgtttctttctttcttggcagctgaggggcaaggcactttataatgaaacataagaaatttatttatttatttatttacttaatcatttatttatttgtgtgtgtgcacgtgcacaggcgtgcattcacctgtgtgtgcacactccacatgtgtacaggtccccacagaggctagaaaagggtgattgactctcctggagttacgagcagttgtgaacatacaatctggttgcttggaacaaaacttgggtcctctagaacagcaagagcctggcagtggtggcgcacgcctctaatcccagcacttgggaggcagaggcaggtggatttctgagtttgaggctagcctggtctacagagtgagttccaggacagacagggctacacagagaaaccctgtctcagaaaacaaacaaacaaacaaacaaacaaacaaacaacccagcaagacctcctaacttctgggccgtcttttcactcaacaaagtttgctcatttggagtgttttactttttatttcttggtactgtggattaaaaccagggattgcacattcaaagcatggactacatggctgagctatatactctgggccctaaagtgttttttaaaacgctcatgagggctgaagagataaagccacgtgacaaaagactcaatggcaaggaaggctctatgtcatctgtaaaggagccatgtttctaggtgtgtaagtttagggccagcctccactacacctgggctatgtgtgataacagagaaatacatgagtcttcctgagactgacccagaactttgaaaagcagataaatagcacaaaggcacttctcctcaacaccataccttgtggagagaaattctgtgacgagagaggtcatttcttttccagcaagttgttagtagaagtttggacataggactcctgactcaactccaagcactgccccaagcctcatgttgcccagagcccagagaacgccacagcacacagtgtgtatctccagtcttgagcaggctctctactgtggcatttagacatggactggattgaatggccaaagagttgtttgagtgatatcaacaggcagattcagggtcccatttgccagtaggtattccttggcccacagggtttttttttttttttttttttggttgaaaaagctcacctcagggccagagcaatggagcccatgaaccatgggctgaaacctttgaaaccatgagccaaaatcaacattgcctcctttatttttgctaggcatttttgtcacagtgacagtaaattgacaaacatacatagtgcgtggttttcagtaaaaatgcaaagttgtgcaatcaatatccctatctaatttcagaacactttttatcacccgccccccacacacacacacctttatcacacacacctttatcacttgttgctgcctggcggccacagccaactttttatctctaaatttgcctatcctggattttttataaaaatgaaatctgacagcatgtgatcttttgtgtctgtattctttcccctcagcatggttttaaggtttggtcactgtacaactatatcatgatatcattcccttttatttttcaaataacattctgctgtatgaaaacaccgaatttgttcatccacttattaactgaaggataacggagttgtttccattcttttggttcttataaatgatgctgttggaggaagtatgtcactgagggtgagctttgaggtttcagaagttcaaaccaggcccagtgcttgctcttcctgctgtctgacaattcagatgtagaactctcagctatgtgtccagaaccatgtctgcctgcacactgccatgcttcccaccctgatgagagaggactaaacctctacactgagctagccacagttaaatgttttcctttataggagttgccttggttatggtgtctctccacagcaatagaaacctgaactaagatgatgtgtgagtgctttgcctgcatgtatgtatgtgcatcacaggcatgcagtacctgtggaaaccaaaagagggcgtcagagcccttggaactggaattacagatgcttgtgagatagaagatgccttgtaggtgttgggaactgaacctctgtcctctgtatgagcagtaaatgttcttaactgctcatccaactctctagacaccttgtttgaatttttgttttgagatagggtcatgtagccaaagttgggctggcacttgctgtgtcgatcaggctggcctcaaactcagagagatctgcctgcttctgcatcttcagtgctggatgactattctaccacacccaccttgtttgttttgttttgagatggtgtctcacataaaccaggctgggctcaaatttactatgcaaccaaaaatgaccttaaactgcttgtgcctccggagtgctgagatttcaggtatgtaccatcataccttgtcatctttgatattacaagtgactctgtcctttttggtttgagttttgtcccataactttcctttaactaatttctgtggccaagttgaatatggcagtaatcttggcattcaagaagctgagacaggaggattgctgtgagtttgaggccactttgggccactgagtaggacaatgttaaaaaacagtaacagaagcaaaagaaagaaacaatgtaaaaacttaccatagcccctggaagttggcaattttttttttctttcgagacagggtttctctttgtagccctggctgtcctggaactcactctgtagaccaggctggcctggaactgagaaatctgcctgcctctgcctcccaagtgctgggattgaacgtgtgcgccaacaccgcccggaaaggttggcaattttaagtaaacttggcttaagtcacggagcttgaagtagggttaggctgttctcaggctcgaggtgaaatttagagacaatgtgctttctgaggtttcatttacatcttgtcttctgcagtaggaaaatactaaatggaaaattccactaaaggtgggtgtggtgcacacccttattcccagcagaggcaggcagagccctatgagttcgaggccagcctggcttataaaatcagttccaggaaagccaagacttacacagagaaaccctctcaaaataccaagcaaaaaaagcagtttataagttttttatctttattaatttaattgaacatatataacatgtgtgagtgtaggcacatgtgtactaaaagtttgggagtagagtctctcattttatggtgatttatggggatcgaactcaggcagtcagactttcatggcaagcattttcagctaccaaactgtctcactggcccggtccctccctccctttgtaggtttttaattgaatgctgctctgagtagcatgataaactctcctgttgcccacttctgccctatccaggaagtgaattgccttctgcccattgtatccatactgtatgtcctatgtgatgcctatcctattagacagtatgaatttaagttataagatcaactatcctgcaatggaactgttagtgttccagaaacttttgtatatttaatgattcccaagcacaatatagcaaaacttcaaattttatcaccgtataatgtttggtcattaattattaatgatctcttatcatatctaacttataattaaacttagtcaaagtttatatgtataggatcagattctagttgcatcttccaagcatccagtgaggttctattcctcagaatgatgaagcaccgtagtatttgaaaggggaagaagctatggatgtctgggaagcagtctagaggacaggtttgctggcttggcttccatattggattttagccacacccaggatgcacatggtgcacatgggaagatgcaggaccaggcacacaggagaggcatccatagcaaccacaacagactcttcctttgcacccatttgatacaggttctctttcttctctgtctctctctgtctgtctctctctcttcctctttttgtattggtagtaatattttctatggaggcatttctagctattacagttgtaaaacaaatcttttaaagattctgcttgagccttgcctggttctctgcccctgtgatctcagtgtgggctacataatcagaccccataagcgggggtggggtggggagtggggggtgggtggggaactgggactaaagaaatggctaggaactaagaactcttcttgtttgtacagaggacccaggtttgattcccagtacccacatacaattgttcaatatacaagcttacaattgttcataattggttccaattgcagaggaatccaacactttctcttgacttctgtgggtaccacacatacacatggtgcacagaaatacatgcaagcaaaccatcatatacatccaaaaaaattaaaaataaacagctgtgtgggctggcatgtatgccagtgtcagagtgcttgcagtctacaagaggccctgaagtctgtcccaagcacaaactctctacctcccactctgtctctcctcctctctctcttgcacacatacacagaatgcacaagccataattttgtttttgttgtgactttgtgggtcaggggttaaggcacagctgggctgggccattctctcctgaagcttcacagccagaggccaggaggagctgtgttcttctgaagcctgcactagggtggttgtcctagatgtgtcacggagatgactttagatagcactggtgatggtcagtggggctaagggtgccctgtatactttactgcgtgactgtttgtgtgtgtgtggttttttgtttttgtttttgattttttttttttgtttttgtttttcgagacagggtttctctgtgtagccctggctgtcctggaactcactctgtagaccaggctggcctcgaactcagaaatccgactgcctctgcctcccaagtgctgggattaaaggcgtgcgccaccacgcccggcttgttttttgatttttgtttttggttttttgagacaaggtttctctgtgtagtcctggctgtcctggaactcactcggtagaccaggctggccttgaactcagaaatccacctgctgctgcctcccaagtgctgggaataaaggcatgtgccacaaccgcctggcttgtttttgtgttttaaaactatttttgtctatgcacatgccatatgtgtgcaggtgcctgtggagtctggaagagggcataggacataggatcccttgggactggaatcacaggcagtgatgtgggttctgggaatcaaacttgggtcctctgcaagagcagcaactgttcttaacctctgatctctgacccctacctctttttattttttgtgacagggtctcactatgcagacctagctgtcctagaactcaagatgtggagcaggccggccttaaattcacagagactcacctacccacctctgcttcctgaatgctgggattaaaggcatgtaccaccatacttcatatttttcagtgttttttttttaagatttatttatttatttattttatgtgtatatgagtacgctgtcactgtcttcagacacaccagaagagggcattagatcccattacagatggttgtgagctaccatgtggttgctgggaattgaactcatgacctttggaagaacagccagtgctcttaacccctgagccaactctccagccatttctgtgtttttaaattaaatttacaagatggatacaaaataataggtaagcttcattatggcatttccatacacatgcactatgacgcttcattcaaatttgcccctcccctatactgccctcccaggaccctcctccttctttctggctggttcccttctggattcaggggcacttttgtttggtatgtatacacagccatctcatggtaatcaattttcacttgactcccaggagagagttaaaaactgtgtggtcttttacgctgtggcctcggaagccattctgtatctcccctactgtattctactggcttcattcagggcacgaagtgttcaagaactggagggcatattgtaaaaccaccatgcttagcccacactgtattaagcactgcgtttctttgtgtatatatgtgtttgggtgggatgtctgctcggcagtgaaggaactgtggagggcagagaacaagtgttgggggttgcttttctccctgcctgtgggtcccaaagatcaggtcggtaggcttgcgggtgcgccatccactggctcgggcccttatttgagagcttatttggaagctgaggcacagagcttaagttcccatcgctatgccattagcaaagcaggcaggatttgaaccagtgtaccctctgagaagaccacagcctccatcttacgtggcctctatagagatatccctaccacatccaagtcacacacagtgagtttctatttatatctgcaagcttgtaaactcccccgagaacgttcaaaaccacacaacagaatgtgtccttttgccatctctggcttctgcatatcatggttttcttttctctctttcattcttcctatcttttcagactaggtctcactcttccagccctggcctggaactcactatgtaggtcaggctggccttgaactctttgagcttccagaatactggaactaaaggcgtgggttaccacacacggctcagcttggttttctttccctggaatacttttctcccatttactcatctgtttacaagattattcctcgggtctttgggaaaaccttctctgactagccagctctggggtaagtgcaccttggacctcagtgctgagcagctgttgttcttacaattatgtctcacaaggtgcctattgtcccggctgcctcctcctctggactctaagggcaagggcctgatcatgttcgtagaagctgtgctagcaaggaacacgctcctcctaaaaaacatgtcaccaacctgcaaatttctcacgaccctcatacacaattatcacacattttttcacacatagacataggaacaaagatgttacgccccagatctgtccacatgcactgtggccccgtgcaagctcaatcactacccactctctcactgtcactagactatcatatgttcaggtaccgctacaggtctcattttcttcaatcgctgccttatactttttttttttttaaacaaatacagtcaccatctgcattccgaaaacagggtatggagttgagtgaatatgacaacagttctatttttcatccacgccatcacaggctgtttctttcatgaacacgatccctgatttatgcaatcactgtcaccgccgtccatcttcccggtttcttccttctcctcccggtgctctgagggcaggtctgcagggtctgctgcctagggcgctccagagtctccgcctgggcgggcgcggcctagccccgccccctcatgcatatgtagtaccccagcccaacggcccggcccccagacggccatttgtagcggtgccgaaggctgcgttcggctgcgctgcagatccgcgaagaagagcgcgctccctggccgctgcgtcctctgccctggagccttcccggctctccagcgtctcgggcaactcccagccggtccgagggatagcgctccgcggccctccaggccactcacggaccccgcgcgctctaccgcctgtaacccagccggccgcactcgtccccggagccgggcctagggcgcgcggcggccgggctgggctcggggcgtcccgatggccgcggccggctggcgcgacggctccggccaggagaagtaccggctcgtggtggtcggcggtggcggcgtgggcaagtcggcgctcaccatccagttcatccaggtgcctggagacggcctgcggggtggcggcggcggcggggtggcgctacctgtggccgcggcgaccccgcccggggcgcgcgggtgcggggctccggcgcgtgcggtgcgcgcgggtgcggtttgcgcggggccagggcgcgcggcatgcgagggcaggaacagtgaggagtcggcgctgcgctcctgccctgcggccacggcgccgcgctactgcccgccaggcgcccggcgcggcgtccggggagtcgggcttctcaggaatgtggcccggagggcggagctggccgggtgggaagnnnnnnnnnnnnnnnnnnnnnnnnnnnnnnnnnnnnnnnnnnnnnnnnnnnnnnnnnnnnnnnnnnnnnnnnnnnncttggcggcggcttcgcgccgccggctcccaatagtgttttctctttgtgtgtgtttgagcttctcttacaagtagtctgtttggtggtacgtccgggtgggagtgtttgatcgtgccctagggaaataatggcttcgaggaagttaaaaatgtgctttgataggggcgagaccatttccttggaattcccggtgcctgcctgcttcgcgcttaggtgaagtttggggtgagccccgctaggaggggacgagtatgagttgtgtgttgcacccttctcccccccccccccattttctgtttgctggaggaggaaagtcgggttgtggcaaagaaaaggaaggtgaaatttgtctttagattttattctaggttaagacgcccgagtgattttcctttctcttttctttttgatttttaaaagcaaatgcagatctccttgcttttgtcaccctgaaaggcgtggcatatgttgggaagagagcgcaggtaccctgctaagtaacaaaggtatttttactgtattaaagaggacgggtagcaaaatgtttttgtgtgtgtgtgtttgttttgtttcacccatttgttgaattgatagagttaaatagcttattttatttcgatgtaactgtggtgtttatagtgttattaagacgcacagttccataacctaaatgataattttcacatcgcgtgaatgaacagtagctgctcctgtagtaattcatggaattaaaaaagtgctgctcaacttttgtattcagagaggatgcttatgtcatgagcgttgacagtatgctcagtggcggtggcagcggcagcggctgcaatggtggggggcgttggtttatgtttaccagtcttcagtctggctttttggcagttgttatttgcctgggaccaaaagagacttaagtggctgacagcaaaacaagtcacagctaagtctccctggtggctggttttggagggaaccaagaaggcagaggatggtcctgggtcccagaaccggtggataacattacttagatttaagtcagaagcatttaagtttttgagggaaggactatctgaatatgattgtttccacaagttagggtatttgcgaaatagtttaaaaaacccttacactccaggtgattactgtcttcctcaggaccttctcgaattcatttgttgacgactttgtgagtagtctggtatctagaggctcaaaaatgaggtcaagtaaagacatgcatggccatgatgtatgcagataaggacctttgaattctacagacttgaatatgtgcctttggtttattggctatgaaaacacccaagtagcttttctgtgcctcaactttcttactagttaaatagctctcagtacatgtcctttataacttttgcattatgagaaagatcttcgagttgtgttgaacatgcaatgtgtactgtgttgataatagtcactttagtaagtgtgagagatgagacctttagatgcaaggggatttgaagaagtcagtgtgggaaggcttcaaagatgcactgtggggctggggatgtagctcagcgtagagtggtttgtccagtgtgtggaaagctctgccttcgagccctagtgccagaaaaagagcactgtgtcttatcaggggttgtgtgagtggaaatgtgatggatctggggagccacaggccagattagaaagaggaggccgatgtgtggggagctgggagtgggagaggcatatgtgacttggggcttttggggctggtgaaacaggaacataggctctgaggttgacttggtgaggaggaaggaggcacaacacagcacctgtgtggagacccagccattcccctgagtttgatgttgggtaagttactgaacctgcctgtgctccggctttcagtcatctgtaagctggggtaataaagttatacagctgtagaaatcaaatggattcacatcaagggcttgggacaaggtgtaggtctacaaaggctacctccattactctgccactcttagattaagtaactaaagctgcagtctatcatctacatcagcacacacttataaacacacccgcaccgactcggaaacatacataccacactcacagtgccccctccccataaaaggggggtgtgtatttagatggcatttcagtttttgttccccctcccaaccctgaccgttctccaccacctcacccggtgttaggggtcaaacccaggactttggcagtggtttaacctcggcatatccttttaacacttaattttatttgtttttttagattgaatcttgctaaggttctaagaatagtcttaagttctgtagcccaggctagccttcagcatctcagttagctaggattaccggtatgtatctagcttggctgctcatactttttttatttttaaaaaaccattgtacattctatttgtgaatagaatacctaagtggtgagtagcctctggttaggacataattttgacatagagtgggaggcagagagttgggagtctcagcttcttccagactagataactggaggtttctgcctctcccattttttcctttagggctttgagttgtttcctgtgaaacactgagtttcattgaacagatctctggctctttgtaattctacagttcttctgtgttctgactcgctggtatctttggtctagtttcttaggttttctaggtctcaatttcccatctgtaaagggagagtaacagagggcttagggtttttggagtaaataaaatgccggcaaatcaaaccaggcagcacagccaaggctgggtaagtcagtgaccaccttatttgtggcgatttggtatcttgatgttcttccaaaacaaaatttgtagtttttcctcaatccataatgtagtccattattttcaggcttcgccctttccacctacaccaggaggtacttagacggtgagtattgatttcattagagttgggaaaacgttattaatttgggattgatttttaagaaatgatggcatagcttagtggtagttctgttaccggtgcatttagggtcaaagcctggcctctgtcaccccagacaagccaggctctgccagttgtccctgacacaccaattaaagagacatgtaatggtgaaaagcagagaaagtacatttattgaagatggcagtgggaagaggaacaaatcaaggggactggtgatccctgtgtcatctttggggtactgccatgacgtttgggtttaaatggaaggaaagaggcatgcataactaaacagactgggtcaagatgtggtcctgcccatcctaacttcagttctaatctgtcctttaaggtgatctggtcagttgtcagaattgtgtgaagtctcatcttggattcatgccgctcttctggctgacaccaggcttcagcctttctcttcctccagcgtgagatttttggaggaagctttaattctttgaggtccgttgttccaatagttggatggcacaaaagttactctctctgctctcctgtccacatagttttagcaatatgtgtctagcattttccaggccctgggttcagttctcagttacagaaaaccaagacatggacaacaacacaaaaattgtaatcattaagttttgggggttaatggttctttggcagctctgagaagaggctgtctgtgttcccatggatttaaagacatatgttaccccgttgctgttcttttagaatcctaactttttacttaatctgttggtcagatttttgagctgtttaggggtttggtggtctcaggttgtagcccaggctagcttggatggaacttgaggttgtcttgcctcagccccatgagtgttttgattacaggcttgtgctcagcttgtgtttcttagtcttgtttttcttgtttgtttgtttgttttcctttgagacagggtttctctgtgaagccctggctatcctggcacttactctgtagaccaggctggcctcaaactcagagatccgcctgtctctgcctcccaaatgctgggattaaaggcgtacatcaccactgcccagcttgtttcttattcttgaacattcatcttaagatcttgttagctaggacagctgcctcaaaaattgtttcttcctagatgttgccttttgaggaaggcattttccatgtcctatcctagatagatttggagtcctgtttttgtgtcagtaattacttgatccacgttccaaggctgggcctttaacatcaatgctgttctcttgctgcatcttggagacactgtagttagaagttagacaccgaagagcaggtgagatggctcagtgaggaaaggcctgcctatctctggaacccacataatggaaggagagaaccaacccttgatcattgtcctcttaacctgtgtgtgctaatttgattttttttttttttcctttaaagataaggtctctgtgtagccctggctatcctggaactcactatctagaccaggctggctttgaactctcagagatcagcctgcctcccaagtgctgggattaaagatgtgtaccattacacccagccaacttttaagattttaaactttatgtaattaactattttgagataggctcttacagcctgggctggtctcagacttgctgtctgtctgaggaggactttgaacttgtgctgcattcccctccagtgtgcaccagcatggcagtgtcttcttagtgagtgcactgtatttggtggttagaggacaattgatacctacttacttgattacctatatgtttacctataggctcaacaatcctgtagaaatttgaaggtacattttgagcatcatgggaatggcacatgtacaaggctatgataggtgcagtcaattgcacgaattggaaaccacctacacagaggaacaatggactaaacagtgatgtgttccccagggaaacacagctacaagaatgattgagagcggtcccagtgaactgtggggtgtttcctcaacatagattaagaggcagcgtggtagaacacactgttaatcctagcacttgagaggcagaggcataggcagttagatctctgtgagtttgaggttagtctggtctgtatagtgagttctaggtcagctagggctactacataaggagatcatgattccctgtgagccccctccccccccaaccttccccttatgacatggggctgggatcactcagtggttaagagcattggctgctctttcatagacctagatttaagtcctgggacccatgtggtggctcataactgtctgtaactccagttccaggaagtctgactgccttcctggcctttccaagcaccgtgtatgtaatggtgcacagatgtatatacaggaagatactgatacacataaaaaattcaaaaaaagttcagaagtaactcctgcgggctgacgggacaacagctcggtaggtaaagcgtttgtcatgcacgtgtgtggacaaacatgttggtggattctgggcatctgagccctcaggagcaagctgcctggctagagtagatgaatccctgagctctgggtcgaaggaaaagaccctgccccaaagtataaggaggagagcgattaaggattaagcgattactcaccttcagcctctggcctccacacgtgggttatgcacacttccacactcttgtgcacctccatgcatatatgtacattacatacacattaagaaaaaaccctcctgttatataaatgaaggaaaaacgcagaaaataaatttgtatttgctcgtggggacaaaaccaaaacaacacagggatgcttgagagactgatgagggaggagggatgaactggaagtggtggtgggaacagggacagggaccctttttggaatcatgttaatgttttatccactcggtatgtaagtagcaaagagtaagtaaggcagtcaagcaatgaaggaaaaggggcatcttgaggggtacagccaggcgtgggcagtgtacacctgtgatcccagcacttgggaagtagagctaggacggtctgctgtctacggccagtgtgggctatgtgagatcttgtcccaagaaacaaagacgatgggctacagataaacaaatgaactaattggtcagcatagcaacaaacattgaaaagaccaggggaaatgcttcaggtaacttttgaacccagtgtttggactgtatcctcaggttagagagggacttgaagcaaacattgaactctggttgctaggcgctgcccctccctacccctccctgtctccttcagcttctgcccccctccctttcctccctccctccttttctttctctcataggcattggtctacagtttgtggcacttttgaatactaatattagcaaataagaaaatgtaatttggaaactaggggccattgtctcactgctggagaggaggctgtagaatcggcaagggcaaaggttagcctgaactcacaaggtaaaaagttgacacagaaatgtgtatgcatctgagtcccttgctgagcacctttccagctccattgagggctgtagaaatggtggaccactaacatccagagtgccagatggaacttcagagagacatctgattccagggctggggtcagaaaatgcaaggagagcttggaatgtcctgcagtataaggaattattctaaaaaaaaccccaaaatgatgagaacttctctgagaaagacaagcaagcctggaagaattcctctgtgctgagttgggcacagtttatcattaaaatagacaagtgcttattgtctataaagaatctatgcggttaatcccagccctggagattgggaggctgcaggaggattgtgagtttgaggccagattgaactatatagcaagatcttgtctcaacaaagcacgaactctgtgctttgttgagacaatctgtgggtaaacttgatcatgataaataaatgagcagaattttgactaatgaatgaacacacaggaaatagcagaatcagagagaaaataaccatttggcaaccataatgattaagcaagaatcataaatgagtattaaaactagtaagcgaggtgatgggtgtggtggggcatgctgttgatccaagctctcgggaggctgcaactggagggtcctgagttcccggctagcatgggctctgtagcggaagtagctggcttttcttctcctgccagtgtgtatttctcaaacagaggaggtacttggctgatctcactttgatatccaagtttactggaatcggtgaatctcagggaggtttcctgccccgcagatgacactcctacagtcagtcagccctagggcgtccgagggaggtgccctgcctcagagtcaccccccccccccccccagccagcttcttcaatgttgcttgaggttaacaacagtttgttttagaggctcatagcttaaccatggattgcttatcccgagaagcgtgtcgctgggtagttttgtcttgtgaacgccagggagtaagctggcaccaagatggctaacatatcactggctctgccacctccctgggactgataccatttggttatagcagtgaagtctagttaaagaatagctgggcattgaacataaccagactgaggcataaaggaaaccaaccttttctctgtttaaagacacctttcctaagtttgtagttggtgtcttggcatgatggcacatagatggcagacatactggagaagtagctgagagcgacatattgatccgaaagcaggagagggtgagggagatggagacagagggagagactgagcccacccttagtgataatacttccttcaacaaggccagagctaaagctaatcaaacattccaccagctagagactagacattcaaacgcagcgtgagcctgtgtgggccactcttattcaagccaccacacatccactcagcaggctttcaagaatacagtatgttgagggatggagagagagatgactcagtggtcatgagcacttgccactcttgcagaggaccctggttctagtcccagaattcacactaggaggctcacaaccacctgtaactccaattcaggggtggtggggtgtgtgtgtgtgtgtgtgtctgtctgtctgtctgtctgtctgtgtgtatcccatgcctcttttggcctctgtgggtattgcacatatgttgtggtacatacactctataagcgtcaataaaagcaaagaatatatagtatatgttattaattatgcttatcttttttgttagtttgtgatttttttgttttacttgtttgatgttttcctcctactctcactgctgaggctagaaaatcaggacctcaggtgtgagaaacagtgagctgcattggtgtcctttcccttgcccactcagccactcttttttggggggggaatcgtgcactgaattactttcaggcaatttttgttcccttcccttctccctcttactcgcttcgggctccacttgctcagacgcaaaggttttttgttttgttttgttttgtttttaaattcttattacaggtggttgtgagccatcatgtggttgctgggatttgaactcatggcctctggaagagcagtctgtgcttttatccgctgagccatctctccagcccttttgggcactttttaaaagagcatatataggcttgtatttacttttgcatgtcgatggtgagcgcagatgtatagaaatggtggaaatcttgttttctttgcttttatctggctccctctcatttctctcctgcagaagtaacttttcccagtgtgcctggcccacttatcattgcagtggaaacatttctcaggatgccactacaatgttcctagcttgcctgggaaagtggcgacgagatactcttagggctgggaaggttttcatctccagttttgtatttatctttttctgttaccttctgaagtgccaggcgattcctgcattcattggctgtgtaatgttccttccatactgttctaagtaactccattctaggaagttctgttagatttgcctttgtggctggcattttctggatgtctagcgttatctgaagcagggttaatgtcttttgatagctcagactgatttaaatggtggcagtattttcttaagaccacaaaattggtatttttttttccaaatcttgatactatttaatgaaaccatttcttctagggtggttattatttttgcctttgtggagaagaatgtattcttctttatttatgtagaagcattcatgatgttggaagtcaagaactgatttgtgccgagagacactgctgtaggattctgaacctttcataaatttgatacaaaagggctagttgaccttcagggtttttcaaggcagggtttctctgtgtagccctggctgtcctggaactcactctgtagaccaggctggcctcgaactcagaaatccgcctgcctctgcctcccaagtgttgagactaaaggcgtgcaccaccaccgcccagcaatatttttatttttttttttttgcatttttagaatatcaagatgatttcaacatgagaaattcagtgtagttactatgcctgaacttttggcagagcgttatgatttttagagagagggtatagggttttcagttgagattttttttttttaattgctggaattgaacccagggacttgcccatgctatgcaaatgctctactactgagctacaatgccagcccagctttcaagttttagatccttcactgttcatctttcagcactggagcatgtagaaagaggttggggaggtgtgtgtgtgtgtgtgtgtgtgtgtgtgcctgtgtgccacaatattgaacattgttatcttgtttatgatttcatctatagactcttgctggttttcattattccaaaatcaggtaaatgaatacttgtttctcactatggtgttttttccatgaactatatattttttttagatagtgtttagtacttactgttaggacatttgtaattttattttgggtatcctctttattcttttggatttctttttattgcctattttttatattgtgtgtgtgcgtgcgcgcgtgcacaggcacccatggaggctgactgagggcgttggatcctctagagctggagttatagatggttatgtgctgccagaggtgggtgggtactgggaacggaacttgggtcctccataggaacaacatgtgctcttaattgctgagctgtctctctaatccccgtcatcttaagttttatgtaacttatgtttggagaaaggttgagtgggtccttttgattgtgggtcaaaggtcaaaggaaaggacctgtagattttctgtgtcttagaacagtaaggacttttacattttggtggttttggggattaaactaagagctttgtccctgttatgactaagctacatcctccgaggcagcactaatgatggattattgttatgtgagcccaggtcttccagttgtcacccagtctgacctctacattgagataacttaagtctccaatagccaagagtgcaggcatgtgctgctgttctggcaagattaagaatttcattattttcttctgtgttttgagatggagttgtactctgtagcctagcctgaaaccctgattttatttctctggcactgaggatatcggtgtagagacggtttcagaagtagaggctgactcccctcagcctttgctgttgtcctaggtagaaagttgttttcatctggaccgagctgcttgtgaatcatgtttagatgctgcgtccgcatccccacgagtacttcagactagacattgctttcagccccattcaccttgacactatttttgaccctgtttgctggcacagaagcaagtgtgtcaatgaatactttgtgtctttatcttgacatcagacttgtatttgcttgtgcctcatattgggctaactggattcagagactcacaggccaggaacacctttgctgtacgtagctaagaggagccaaatatccgttaatgtttcttaactgttagcattgggtcttgaataaaacttaatcggaaatcaaagagctcttaggagcaggcatgacggcccccacttgtactctactggggagatggaggctggaggatcaaagttcaaggtcgctcttggctgtatggggagtttgagtccagcttgcactgtatgaaactctgtttcaaaacaaggtcttaggaagaaatgagttgtgtctatttatgtccccctagcagctgatactgaagagggcaaagagccagctttcctttcggatttcagagtttctctgtagtgagaagatcatatatgatacgtgcggatttgaatcttgaggttttgtttcagcagggctggaggaggcggtatagtgggtaaagtgtttgctatatatgcctgaggtttggctctccagaatgcatataaaagccagacacaatagtgtgcacttttaaactagctggtggacagagacagatagatcccaggggcttgttggctagctgtgtagacaaaagggcatgcttcaggttcagagagataaaaaaaatgtgtcgacaagatggctctggggtaactgtgcctgctgcccagcctgatgagacttgagttcaatcagagacccatatggtagacgacatgtcctctgacctccagcgaaactctgtatgtgtacatgcacgtgcacacgtacatacacacataagtacgttatggtagtggatccacacatagtcttctttagcccaaatggtctttggacaagatagtcttatatatcttaatttctctggaaattctgatttgagcgatgcgagagagccttgagagaaaggagttggaaagttgctacttttgccttatttcttggtgggtttttctcctaatgccttattttgggttccatcatggcgtgtggctgagactagaacagtcagccgtggctggaaggagaggatctttgagtgggtagtcacgtccaacttcaaggaaggtttgtgacagggcagaatgttgatggctcagaaatgacggagacagacgtgactgtgcagtttgtgatttcaggtcttttgcttctgaaatgaagaagtggcagctagctgaggtaggagtttgcgttaaactttctgtgagcatttttgtacatgtacacacaggcttgtcttcaactcgagtgggtttatccttagagggtgcctgtcatcatggcacttgcctgtgtgatcctagctgaggcagaaggatcaccaggagtttaggctggcctgggctacagatgagactcttaactgagggagaagtttgtggggttttgaaataaagaacatagaaacagaatttaaagcggaggttggttttgtttgtttgttttgtttttgtttatttgttttgagatagggtgtctctgtctagccttcgctgtcctggaacctgctctgtatataaggctggcctcgaactcagactggactgtctctgcctcccaagtgctttgcttaaagacgttaagaacagggtgggaatggtgagggctgtgtttgagtagttcagagttcaccacatcttgagtcttggagttccttaccattgtgaagtcggggaggttctgtggtcatccgctcattaatcaaacccttttatttatgtgtgagattggctctcccagtgcttgttgccttgactgcttttggagcacagaccccagctgtcctgcctccgcctgccaagcacctgggcctatggccgatgacagcacacactgcttgagtaggtatgaaaatagggcaggcacctctgccgactgtgattgggctgcacatctccgttttcagttttaaccgtggaggctcccgtggtcttcttgcagtatgtgatgtgcctgcttcaggcttctctgtggcgcagggtttcaggaagcagcgttaggcagatgaagctgtctgacgcgggttacttgagtctctggttttggatggacagtgcgtggtgcacagctgctgctccaacggctttgtcccagctgtcctctctgcctgtcgcagaatactccacattcctttccctaccctcctgtcatactctagactattacttaagcggatccccgcgatcgttacattggatgacttctccaccactaatcactgtttgcttagaccggtcccggtatgtgttgtgtaacagattcaagccctgcggtctttgtaattttgggttatgagttaatgttacggttgtgaaatattgatatacaaccattaagtgattgccattgaagagggtaacaaacttgatgatatcccaagcaagtagctggtatctgggtagtggccctgcatcctctcatttattaacttacctgtgttagtaggtttcaataaaagtgtaaaaggaaaagccatataatactccattgttatatgttgtgatacgtttttttactatgtagccctggttggcctgcagcttgctatgtagactaggctgtgtggaacccttgtagataacgtctgcctgcctctgcctcttgagtgctggggtagaagatgtgtgtcaccaagcctggctgcatgtatgttacaggagttgccttacttgatctgtaattactttatcatttccgtttcatatcgggggaaacccacactcagttgtttagtacttgctcaaaatcctgcagtggcaacagatttgatttgaattcacattttctgatgttgaagccagtgtagagttggctaatcctgacatttcagtgtcactgtgcatgtatttctgtctttttacaaaaggggccgctgccgggcagtggtggcacacgcctttggtcccagcacttgggaggcagaggcaggtggatttctgagttcgaggccaggctggtctacagagtgagttccaggacagccagggctacacagaggaaccctgacttgaaaaaccaaaggaagaaaaaaaaaaaaaaacaaaccaaaacaaaaggggccacttatttaataactgcagagcggggcttgaatgggaagcacagtgctttttccggcatccctcctccagtcctttgatctgtgatccgtgttgctggatctacacatggttctcaggctactgcctgctctcagctgggcagccacagtgtagtcatcaaaactcgcccctggctcacacctaagagaaggactgctctcctggggtattaattacttgcctgtgtgaccctcttccttcccccagcccttctactctgtttacactcttagtttgttttttatttttattttttgagacaggatctctgttatgagatctggaaatcactttgtagagcaggctggccttgaactcacccagatccacctgtttctgcttcccaagtgctgggattaaaggtatgagctatcatcatgtctggccttaaaactctcactttgagaaaaggtctcacgcagcacagtcatatacaagacacttgtgaagctggagttgttgttgttttgttttgttttgcttttttttctgagacaggatttctttgtgtagccttggctgtcctggaactctgtagaccaggctagcttcaaactcagagatccacctgcctttgcctcctaagtgctgggattagagctttgtgccactgtcacctggttcaaagctggattctttaccaaattttctgttatttctgagttatttcttagtcatctttttggctcagattttcttcttagtaggacttttttgagggagtattcagatcaggccctggtctcctccagctgcttctgtagtatcttggagacttttttttttgaccccccccccccccccgccccagttgctgtgctccaacctttctgcatgtatgggagttcaattgctgaaacccagtgtgtgtcatctgatgagttgctcacataccacactgttgttataagaaccaggaaatcatagtcatacttaatttaatttaccttgttctgacgtcctttccgaccaggatttagccaggactgctgttgcttttaccttgtcatgtatttttagtcttccatttgtttgcaagagatcccacatttgggtttgtgtgatatgcagttaccagaattaaatggtgtgtttggggcagctatgtcacacagtgctgttctgtctttatctagcacatcattgtgaagaggctcgtgttgtctgcctgtcccattattgatggcaggagacctcagtgcttattaagcactgagaaagtactgttgttgcctttgtaataagtaaacaactgtgtggctaggagtacgggagaccaattcaatgactaatgttattttagctgttgggttgtgtctttcctttctgccctcacgtccctccctgataggactactgcctctactttacattttatgtcatgatatttctcatgtcttcaaaaattttaggcccaaagtaattatatttaaaaagtatttcttttgtttttaaatatgttgtctgtggaggtcagaggtgtcagatcccccggagctggagctgcttcatgggaacctaacccaggtcctctgcaagaacaatgtgtcttcttcaacccgaaccctctctgtcctctgaggacctgagaggagcacagatgggtgctctgggagaggaaagtgtagctgaggtctctctggaagcacatccgtgttctaccagctctggtaatgacagttactgataaagctagcttagggccagctctgctctgaaatgtagcttaagactgagccctctgtcctgggaatgccagtgctgtgtacatgcacaagtaccacacaccagcttcaggctattgtcacctcctgcctgggcggggagatggttacagaggtgacaccagagtcttcagttgctagtgtttatgcacaagtgtgctgatcatcttgcttcttgtttacagcagtctctgagttattgttatactgtagttagttatagctaagacagaccagggaatgtgtgtgctcaggcttaactatgcagtcagatggaaacctagctcttgatttgatgttaacggtatcatggtttgttgacaaggtagaaatgtgttcttttgggggtttccttaagggtgggaaataattgaccctccatgtttactcaaacaataaatacaacttggttatgattctttttgcagtcagaagtttctatttgtgggtaaaatgtgtgtctgcaagcgtgtgtgcacacacttgtacagaaagatgtgtgttgtgatttgcttttaaaatggctttatatggtttctacaaattactctgaatctctgtgtctgatttaatctgggtagttactggaactgatgattaatttgccccaagttttctgtttgaggaatgatgcttttagcttctcatagcacgactatgtatacagaatgcgtgttcacagaatacggctttatgcaggtgtggatcaagatgaaaagaaagtagggactatccaaatactaagcctgggttctgagctatgccttttactaccttggccatgcagttcgctcatttatgaaatgggtaactgggctaggtgtggtggcatgcaagctagaggccagccgtggctgaacagtgagaccatgtctcagaaaggctgaggtggtggtggtggtgtggtggtggtggtggtgtggggacctgggggtgtagctcagttggtagagttctgacctagcacactagttcctgggttgatggctagcaccataaactggcaccgtgctctctgacctccaccatgtaacaaattggcaggtagcgtggaatacaagatcctgtctcaaagaagagggcagtggtggttggagtagagaatgggaagcagaggggaggataacttgaatggagaacattttcatcaggagtttaaaaatttccctggcagtataggattatttatttagcaaatgtgctgcttccccttgtgaattgctgaaaaaaaaaattccaattgtatgaacacacagagatcgccctgcgtctgcctcctgagcgctaggataaaggtgtgtgccgatgctacaggctaggtgattataaggttaggataaaacaaacaaacaaacaaacaaaatacttggcagttgttctacagaacttgctcttatttggaaaagtctgctttttggagagatggggtaggaggaatattaagatctatgtttgtcacttacccagaatgcctggagcagaagtgtttgggtgtcaccacttccctcaggtataggtgagcattcccaattcaaaaattcagaatgcatataagccgggcagtggtggcacacgcctttaatcccagcactcgggaggcagaggcaggcggatttctgagtttgagcccagcctggtttacagagtgagttccaggacagccagagctatacagagaaaccctgtcaccaaaccaaacaaaacagaatgcatataaatccaggcctttgcaaatattccatgacgaaagttttggatctcagcgaattttggactttaggtttctagacattaagaatattctagttcttatatgtattgttggggactgaatttgaggtcaccacacttgctgggtcctagataggtgaccattactgatttccatattaaagaggctggggttgtaggctgtactacaagtgtttgcttggcatgtatgaaaaccctgggatgtttgattgacagtaggcacaaaaatttcataagaaaaatactggtaagagctgggttcaatagtttactgctgcatcttagtacttgaacatgcatacaactccctcccccaccacaccaaacagaaagaaactaatcagtgctcggggtatatgtagtactgggtggcagagtgtgtgcttagtcctcagcacctaaataaaccaaacactacagcagcatgcatttaacagggagtggctgggacctggtgaggggcacagggagtgagggagggtaaaggcaggggaaagagggctaaatgctcttctgagttgaaggtttacattgtaattgtccgctgttttgggatatgatgactaagcagttaaatctctgaaaatcagtgtggtctttggtctggggtcccatttgatgctttggtgtctttgaagaagggtgttacaatgtagtctaggttgaactcaggctcctcttgcctcctcctcccaaactcagggatcccaggcattagctacggtgcctgctctctgtaaatttttgagatctggaaacagtgtttcacttctggcgtggttgggtttcctaagatacttattctttcactggtgtgatccccaaagcagagccattcattttgtcctgttgtaaatagagccactaaactgttgtgatggagttggtgacattgcttagtggtaaagtgcttgtttgttgaagaccggagtttgagcattggatctcacataaaggagacagagtgaactccacaaaattgtcttctgacagccacatgtttgaggatgtgtatatacacatgcacacacacaatgacagtgatgatgatgatgcatgttttacacacacacacacacacacacacacacgcacacacacacacacagtggtggtggtgctgctgctgaagaatatagacatttaaaaatcttgaaatggaacacgtttggaaaatgggctgttgaaagtggctggcagactcacccctccgtgtgtgtgtgtgtgtgtgtgtgtgtgtatgtgtgtgtgtgaaggaatcttttgtcaatctgttaaataaagcctaggtgataactcctcaacaggagatgctgaagatagatagatttaggatctttgtcatgctcaacagacattctaccactgaactatgctactatgctctcgccacagaatactcttttaattctatattatatgtacctaattataaagggcagcaaatacatctaaatacagatttcaactaaaaacatcttttctttttgaaacaaagtcttgttgtgtagaccagggtggttgcaaacgtggaattcccttgcctcagagagctgggattacaagtgtctcctattcaccccagatctgatttctgttggtggtggtcaaaggtgtttccgtcatagttgttgagagaaattctgaacacaatcacagatttaaaaccctgttttttgatagtaagattgatcgtcacgtgatttgtgaatcttattcactgttgattggaatctgtatcattacggctccgagccttagtttccagagctgagcagatttaaagggtgagttggctttgattattattattattttaataatcgttgttgtatatgctggcagcacttttgcagagagggctgactttgaagtctactacaggttcctgcagagactcggaagcagaaacggctaatgctgattggttggctgttcagttaactttgcttgtgagggttaagctggagggaccatcttcttcattcagcttgcctgtccagctatggtgttatttttctcttcctcttgacttcttgggaggtcagacaatcaattgcagcttgggagtgtaatttttcaggctgagtagcagcattttggttttgttgtaaggcttagtgtagaaacttggtctaaaccagtggctgcctgtgagttccagtaaactgagacattgttgaaaattctccccattttctaatcccaagaactcaaaaatcctggttttaatgagctggatagcgttgagtcttctttcagggtttattggcatgtatatcattcccactcccagtcttagtttccagagctataatatgtggtcatggtgcttgagggtgtgggcttgtggtggacacccacttagcttcttcttttctacatttttatatacacagtactgcagtctgctagtgttcctatttcatcaacctcccttctcatttcttttttaaaattaaaaaaaatgtgtttattatgtatatgagcatttttgtctacatgtgtttgtcgatgcaccatattcatgttatgttcttagaggccagaagaggggcatcgggtccctggggactggagttacagatggtcgtgggctgctatgttggtgctgggaaccaaactcaggtcctctgttaacatgctaactactaagccatctatctttgcagctcctgtaactgacttattaactgactgagaaaactgagtgaatacttttgaaaattactaaaaatacaaaatgctcaccttaccaaataacacagccaaagcaattcagaagactgccacgggaggcaagggctttccctgttttttgtttcttgctgctgacatgcttatcatgataagtagtagtaactggacagtcgatggcacaaccattatagatgtgttatatgagttttgacaaacgagtgcaatgttctagcactccaaggtcactctgccccgacagcagcctccacaggtaaccacctgactttgatcagcctttagttagacatactttccttcttttatttaattagttaatttattaattatgtatatgtccatgtggaggccaggggttgccttgatattttcttcaaacaccgtaccgtgtttgttattagttattatatgtgtaggtgtgcattgtgcattgcgcttggaggtcagaggacagctttgtgacgttccatctacttctgtatgcattctgggatcagtggggatcagtctcaggaaccgaagtatctttaccccctgagctgtctcgctggccttagtttggaaagatacctttcactgattcgggagctcgcctatttggctaggctagctggccagcaaggtccaggggtccccaggacctggattgtagatgtgcaactatgtgcgggcactttacccagcgactggctcccagcccttggcttgttttcagtcttgacatgatatgactgcagtgtattcttttgtgggtggcatgtttgctttgtgattcctccatgatgttgactcttttggtagtttgttccttatttggtagtaactcgtgtctgcttgtcgatggaacatttaggttgtttctagtgtttagaaactgtgaataaagtctctttggaggttgacacacttgggtcagagactaagtgcatcattttggaaagcagcttggcagtgtcccataaggctgataccacttacagctacagcctgtctggaggactccggtggccctgaatccacttgctagttagctgatctcctgagtgtatagagctacctatcttaccgtggttttgatttgcttcttcctaatgactagtggtttcaactgcacagtggctaattgtagcttctttggtatcttctcagatcttttgtggtttgcaaattagattctttatgtaaatgaattctatagatctttcttttttaaagatagggtctcatatgtagtctctggctgtgaatgcagccttgtagctaaggataacggcgctcttcatcctctagtgcctctaccttcaggtgctggcatcacagcacctgtttgtccttgtgtcctggattgctctggctggaaagtcctccacacccttctgttgctgggatcaaacctgggacaagtgctggggctaatctgaactagtcctggcgatgttaaaacagttaaatcagaatggaaacagcagatggtctcattttgttaccatttattttccttgccatcagacataattcttcaaaaaatactttttggtcaagttctgtgaatatcttgttaatgcttttaatttaatgtttgtaacagtatagttttgtcagatgttcttttggagcatatttatttaatgttcactcattcatttaatatttaacattcattcattcattcattcattcagttatgaggcagagtcttcggtaactcccgcttgacctccagcctgattatgtgctgagggtaactgactcctgattctcatgccccgtgcctgctgcgcttattgctgacacgtttctgcttgttgccagtgtggtcctactctggtacatctccacgcccttttgttgttagcctctttccagggagctgcttggcttcatctcagtcaccattgggtgcaggcagcctctgtttttctcttcatgcacccccaggtctgactggggtttgaggccttatttttccagtgactgagcagaggcacttatttgtcttcagttcccagagcataggaaaggataaataaatcattttcatccatgacacgtgtctctggtaaattgtggtacgcaatgggatggctcctggaagacatcttggaactgaccagcattctgtatgcgagattttccttttcttgtggagagcttggctcatagaggaaacttcttgctgtcgtattgcatttcagggatgcttgttgtcatgattctaatagcagttttacaaatggcttgacttccaagtgcaatcgagtgagttcatatggtagctgcttatgcttggtaaactttttttagttaaaatttcaaagatgtgtttatttagcctctctctctctctctctctctctctctctctctctctttctgtgtgtgtgtttgtgtgcgcatgagtgtgcaagcttgtcttcaagagaacacatggaagtggggagagtctgtgagagatttttcctttcctttcctttttccttttccttttccttttccttttccttttccttttccttttccctttcctttcctcactcctatggggtcattttaggcagtcagaggaaaagagaggaaaggagggaggcagagaaagagaaagggggaatataccaacatagtttattagtaaattgactgctttaagcactcagaaggaagcatgagttgtttttccccctcccagtgcagtagagtgagtgagtgagtgagtggcaagactgttttttcccctttgactctgtggatacctattttattttgcatttttgggtgggacttacagcccttgttttgagatccaaccaccagctgggctatttttgtttttacatgctactttgagtacatcagtaactgtttcttctgtaatgaaattcgtgcgtgcatgcatatcttaaaacctcactattgttttgacctaatttgatttgtgcaatttctgtttcatctctttctgtctgtgtctgtcatctgtatgtttgtgtgggtgtgtgatatacgcttgtgtgtgaaggtgcgcgtctgctgtggtgcttgtgtgacaggttgagatggctatttttcttccctttagaacggcgagtgagcctctgtcctcttgtctgtgcccctagatccgacactttaatctgagacactacccagcctgtgaatttttctttttttaaataagtgcattttatacacctgaattgagtagcaagatcataatgggttttcagtgtttagcttgtaggactgcaagtggtggacaggctggcataagagttccagttgttgatggtacagacttttgtgcactttgttcttagtggcactgtgtcctctgtgggattgcatgcttggaataaaggtgtagagtgtttatcccttaaattattctttgactgttacacagggtttactgagccaatgtcagaactgtgaaggttgaattttttttttaaacagtattgtctgttctcacacattagcccccaaaaggaacaggttccttgagacgttttattgtggtaatttatgtagtagagtttaatctgacgtgtgtaactctttttttgttggtttgtttttgcccccccccccccccccccagccctggctgtcctggaactcactctgtagaccaggctggcctcgaactcagaaattcgcccacctctgcctcccaagtgctgggattaaaggcgtgtgccaccacacctggcttgtgtgtaactctttttaaacagatgtggagacagtgacatacttcctggaagagaaactgaagtaaaatgctggggacagggatgtagcttagagggaaggaaggaaggtggctttccctgaggtgggaagccttggaccctgccctatccagcagtcagcctcctccaactcccacgttctccaaacccaacccaaaattacaatatacagagggctaaaaatcataatgatatcactgagaacattttaaagttacatttatttatgtacatgtgtatgtacgtgtgtcagagagctcagaggacaacccctgggagttgattccctttttttatttttttgccatgtgggaacctgggatggacttcaggttgccaggctgagccatcttttcctgcgtttttttaatagcttcaatttagaagctggataatagtccagttacttaatgtgttaagttgccactttccagtttgatgcaaattcagcattaggtgtatttgtgggattttggatttgttgctattgtgtggaagcctttcctaccactgctgatcccatactgtgggataatgaggttgctcaagaaaagaaagcccaattcacttaaagagtttggatatttgagtggtttcaggaatttaaaaattttcaatttgaggaagttaatgagaaaagccttgctcaaaatagaactaattgttgccctctctcaagtcctcacttgtccccagagctgggcagtgtggtaggggaaatagtctaatgttttatacaaaattatacgtttttataaactagaagataaaatgaagaggatgtatttgtacaacatcaaacaaatatgagccctgggcctgggaatgtagtcggtaggcccaggtctgtaattcctgggaggtacagtcagaggggtcagaagttcaaggtcatctttggttatagggggaatctgaagccagcttttgataagatgagcaagacaccttctcatccaaaccaaattacacacacacacacacacacacacacacaccctttcccagaagtgcaaacactgtggaatatcagtgccataattccttgcactgatagagttccttccaccaaggctgacaacacttaagtaaatgaagacgtattttatattggatctgatggtacaagttcaaaactatgtcattttaaaaagttactcaacaaacttgacgccaacttgacataagaacatgctaacactaaaagcatcaaggaaagatccccagggctggcgagaaactcagaggttcagctcactgaatgctaggctctagcagaggtcccgagttcttctcccagcgcccacatggaggcttgcagccatctgtaatgccgtttccatggacttggatgtctccttgtggcttcctctgtcactaggtattgtggcggtgcacagatgtgcaaacaaacactcatacatgtaaacaaaacaaaatgaaaccacctcgtagcaaatcttaccagatttggatctcagtgacatgcatatttaattgacaagcacgacaaagctcaagaagctgtgtgtgtgtgtgtgtgtgtgtgtgtgtgtgtgtgtgtggtgggggcagggttgggctggaaagatggctcagtagttaagagcactgttgttctcccagaggacttggatttgatttccagcacccacacgtttggctcacaactgtctgaaactacagttccaggggaccagacaccctcgtctgacctctgaaggctcttgtaagcatatggtgcacagacacacaaagtggtgagtttttagtgtcttagttgtttctgttactgtgataaaatactctgatataagcaacataagtgagaaaaggatgattgtagctcacagtctaaggttcagtccattaaggcaggaagtccgtgacagcaggaacttgaagcagctggtcgtatgcatgcatttgtaccaatcctcggctctgttctctgcgcagtccaggctcccctacccagacaatgctcctacccacatttaaggccagtcttctcacatcagttaaagtagtccagagaatgcccccatgtataacgagaggctcataccccaggtgtttctagattctgtcagggtgaagtaaagttagcactgatcatcacatgtcgcaaacattttactttattaaacattagtgttctaggtaaattaatataaagtctcatttaaatgtcatctaaatatatttacgatatataaaaatacgtgtaataaagtttaagggaggatccagagagtgtgcaggctcaatttttagatttatagatgaattatcacttcatcccccaacattctgcattggagtacagccagaagcatagctcctcttcatcttcttcctcttccctctcccctcccccctccttcctcttcctcctcagattttataggcagggtttctctgtgtagcgctggctgtcctagaacttgctttgtagatagtctcaaactcaagcccaggatccacctgcctctgccttcagagtgcttggagtccaggcgtgagtcaccatgcttggctcagcatcctttcttgaggagtctgtctatgacccattctactgctggtttttatattcaatttcatgtatgagcatgtgtttctcagccttctggtttacttcatttgtcttttcctgtctcccttctattctaaatgtcagaaacggcaggataaatgtctctgctatattcttcactaaagatcagattcagctcatgcatgtctgacaattgtggtatgccagagcattttaggtgctgggaagatagcactaagtcagagacatagtttcagagcttacacacatagagtttattgaatcagtgttttaaacactatgtgggatcataaagtaaaattaacattttgacaattcatgaacataaaatatttttatagcattatgtattacatttttccttttttggccacttgagaagaagatacatagtagatagccatattacagcaaggaacatacaagcattgagtgaagtacagtccagttttagctaatgggcttttgttttgtttttttgtttgttttccctgtttttttgagacagggtttctctgtgtagccttggctgtcctggaactcactctgtagaccaggctggctttgaactcagaaatccgcctgcctctgcctctcaagtgctctaagtgtgtgcttttatcagtctgatactccttgctgggttcaggaggacccctaagacatttccagatctttactctttttccctatgcaagggtgagctcacatcggaggcagggctgtgtgtgtgtctctgtgtgtgtgtgtgtgtgtgtgtgtgtgtgtgtgtgtgtgtgtgtgtgtgtaagaaaacacggggaagccactgaggaaagggtcagagagtaagtgagagacaaaaatcagaaaagccttgcaacccgaagaaggatcctttacaacgaggagaaaaggttacagtggctcttgaaggcagaggcttcatctcccctatggctgttgctcctgggtggcactcatacataaagcaggacctgtggtggattaggctgcaccccaatgtggtgcagggactgcagaccttcagactcttagattttgtggggacagagtcttgtcatccaggctcccacagtttgaagagttgtccaccgccatgtctcattcagtttcgacagtgaatctccaattcagttcagcagtcgatcctcactgggcaaacagtatcaccctggctgtgttcccagccccttgatcactccttaaggtgtgagtctaaggaaagacgctttccttagtgctacccttgtagagtcccacctctatcctaaactttgccctgggtcctgtcagtggcaggagtcatgtgggtgactgacactccccagggaccagaagtacaataagctacttgtttgcagtctacctttatctttgtgttgcttatattcttacagaggtcaacttgcgcttacagttctttccctttttagatcagacatctttatttttttctttacatctatttatttttagatttatttatttgtattttatgtgtgtgaatgttttgtccgcatgtatgtatgtgtacaagtgtcctctggccagaagaaggcaccaaatcctttggaaatggagttcccaggggcagccatctctctagtccacagcatgctacttttcatgactctgtctgtggctgtaaaggttgtgaagaaagaactttgaaatcaatttattttgtattttctttttcctgataagtgttttggaaaagtttctccagagggctttttacttcatttcactgttagcgaagttgataacttttcctaagagcaacaaaaagctggtgaaggaatcttttgatgtctactttagcgctgaagactgctcctgtttctgtaggaaagtgcgtctggtgcttttattttgtttatagattgaaattcactaaagaaacgtgtgtgtaaatgaggcacacacacacagaggtctctttaaaatctttgttttgattaatttatagccttcagtgtcaattggcctttggcttttggtaccaatcgcgtgactctagacaagtgtattgcccttgaagaaaaacagctttgaaaagatgtgttagaacatgggaaaactagaatctgctctcttgtggtttcacggggtgccagaggcgcttgtgtctcactcagttgctttctgctcaatgaacagattacagcctgtgcctgcagcctcactgcaaaggaaacagcaggagggtgaagccctcaagtgaacccgacttttttgtggggtgtggtgggtgggcagtctacaacttaaataaacaaattgaatcacgcaggaagaaaacctttgatctttgcactcttcgcactgactttttttctggtatcgttccttattgtttaaacattttcacgatggttagcccacggtagacctgcgactgcaggcgtgttgtttagtagcttttaagtcttctttgagatcatttattcagcaagctccttttccctttgggtgggcagctccttgttgatgaaggtctgaattttagatcctcacattgtggtcaagggaactaatccttttcataatgtcacgtgggattcttttcgctggtttatttttgaaggttttggctgttttgatcacacatagctattttctttaactctgaaaaataaaacccattttatgtccctctactacaaagctcctcaggaggttcccagcctttgatcacttcaataccaggaatgagataaatgtgttgaaaatctcctccttgggcaaggagaagaaatccttcattattcgtggctaaggtaccgttgttatctgcagttgtaggagagagggaggctctgctcccagacctaggacatcctctgcctgcttgccagcttggcgtcattgccaaatgccagggttgactgagtgtgtgggagaaactcttgaaaaaatctgaacatttactccacacgtatgaagaaagtagaagtgtttcgttccttccctcctgtctcccgtcttctctctttttccctctgtccctgtctccccctttccctctctcccctgtcttctctcttttcctctctcccctctgccccctctcttcccccctctcctctcttccctttctcccctctttcccctctctcccctctctcccttccccccactctcccttctcccctctctcccatcttccccctttgcctccctctgttgaggctggggctcactgtgagccctggttaaacctaggacttgaacttggggcagttttcctgcctctgctccgagtgctgggaccacacaagtgcactgccctgcttgcagcattatatttctgaaggtggctgctgggggcgggggcaggtttgggggccattcagttccagtagccattagcttcctggctttggatggggtccctaacttctatgcctgcgtgtctgcactgggggatacctgtcctggtcaaaagggagcttcagagtctctggagctagttgcaggtggccgtgagctgccctaagtgggtgctgggaaccaaccccctaccctgtggcagagcagagttcttagttaatctcagccctctctccagcccttgaccacctgctcctcccgcctccaagcacctagatcacagctgtgggctcgtcaccctgctttaggcttttacagtttgagtcttttgtttttgttgttcattgagatgatgaagactgtgggatccctcccccatgtctcatagatgcttctgcaggactttgtgctgaacccactataacaacactcaaatgtcctccactccaagacacaccttcctcttccttttttgcctcctcaagggagactccttgagagcgagggagtccttgtttattttgttgtctctagtgagctctgctttcgttgaactgcagtgtgaaattttccaggctggagctgaacacttggtgagtcccagtcagtaaaggggaggttagttgtcccctgcccccccttctgaaagtctcatctcctatctttttgatatgctgagaatgtttatcgtcttttgcttattgcatggagctagtatgtaaatgaggaagccaggggaaccatgtttggggcataagactttagtccttgatggtgcacacagggccagacttcctcactgagcttctgatacagttgtggatgcgccttctgctttagtagtgtcttcagaaccatgttgtttgtgaaatttaaatgtaacctcttattataaatagctgtgcgattgtgaggcttttggttttcacacccggatcacagtgagccaagtgtttacttgaataggtggagttggtctctttttaacttgacctcatgtaccccaaatcttagatttaatcttagcattgagagaaactactgtgtgtttttcttaaattaactttgacaatgtgaatgattagaaaagtactgtctagaatctgaattagtatttgtctagagatgactaccacacaattaaaaacaaataaatggtgcttgccacgggcaggtgctctgccattgagccgtatccctagaccttgcgttttgaaacaggatcatgttgtggagttctggctgacctgaaactccctgtcaccctgcctcagcctccgcagtactggagaatattgttgttattatttttatcattattaagaactttagatttacagaaagcctgaaaaaatactatataaaatttctaagtatcttcattcagatttctgtggtttttatctaatgccttttctgtctgggtcccaccagggtaacacactgcacccccatccatgtcttcttggactcctcctgggtggcttacctttgtttggctggccctgactcttttctcacggcaagcctagggttatgggggttggaagagagatgcagagctaaagcactggtttcattatgtcatacccagggtgcaaactggtgtgtgcttcatgactgctggagttgactctgactggcggccatatttgtctgtgaatcctgaggaccccccctgcccactgctttatttatttatttatttatttatttatttatttggaggaagccattgtgcatagctcgtgtttaatgtgtgggatgtttatggttttagttgttttgcttttgagaaagggtctcactataaaacctaggcagtctttgtgagtcaccagacttggcattgcagttttgaataaccatacctacataggactgtagtataaacatttaacctctggctggtaaaatttatgttcttatcaaaaacatggctatttaaaactgctttcagagaagctggagaggctccttggtggtcttgggttccagggaacccaagcttggttcccacacctccgtgacaaggatccatcaaggagatgtgacacctcatgcaggtacaaacaggaagaacacaactctcatatataaataaaataaactagatatcgtaaaaaaaagttgaaatgcattcagagattttatttggcagaaaaatcaagcttttgcttattgtagttttagctttttccactgtaagagagttnnnnnnnnnnnnnnnnnnnnnnnnnnnnnnnnnnnnnnnnnnnnnnnnnnnnnnnnnnnnnnnnnnnnnnnnnnnnnnnnnnnnnnnnnnnnnnnnnnnnnnnnnnnnnnnnnnnnnnnnnnnnnnnnnnnnnnnnnnnnnnnnnnnnnnnnnnnnnnnnnnnnnnnnnnnnnnnnnnnnnnnnnnnnnnnnnnnnnnnnnnnnnnnnnnnnnnnnnnnnnnnnnnccttattcagatatttgcctacttctacctctagagtagttataagccaccatgccttgcaattttttttttttagattatgtatatgaatgttttgtctgtcataccatgtgtgagccaggtgtccaaagaggccagaagaggacctttttttcaagacagggtttctctggctttcctggaactcacgctgtagactagtctagccatagtcggtttcacctcctgaattgctggtattaaaagcatgtccccacctccttcatcccccaccccttacttccccgaaccccctggaactgtagttacagatggttgtgagctgccctgtgggtgccaggaatcaaactcaggtcctctgccagagcacaccttaaccaccaagccatctctccagcccctctgcatctactggtgatgccatctaagtgctgtgcacacatgtgcatatataaatatattaaaagatacaattaaagggaaatgtggactatcattggtctttgataagacctgctaatgttttggtctctcttgctttcctgcacttcttcactgttacttctaaactgagggcttagttgatatgtaaattatgcttatagaccagaaccgcccagaacccaaaatgcccaagggaaagcacccagtcggaaacccccattacagtggacctctccttggagttcccatttgtctctttcaattacaaggcttactttataattagatcagaatttccaccttaagttctcagcttcctagttatctgtaactgccgtgtgaacctgattgtaaacaaaaccttaaaggatgaacttcagttgaacagtttcagaaagttaatggacttgcaaaatagaaaataggtatttaatttcacgtgttaagttgaatgtaagaagtaattgaaagaaggatttgtgttttaaagatgaggcctaaagggtttgtgtgtgtgtgtgtgtgttttgtctgtctgtctgtcaatatttttccagtttttcaatttggatgattactattttaaagcagaaaccaaactcaaaataaacagtaaaatttacttctaaaaaatttttttttgagacagggtcttactgtgtagtcttggctggactctaagtcactatgtataccaggctggcctcacagagatctgtctccccagtactgggattaaaggtgnnnnnnnnnnnnnnnnnnnnnnnnnnnnnnnnnnnnnnnnnnnnnnnnnnnnnnnnnnnnnnnnnnnnnnnnnnnnnnnnnnnnnnnnnnnnnnnnnnnnnnnnnnnnnnnnnnnnnnnnnnnnnnnnnnnnnnnnnnnnnnnnnnnnnnnnnnnnnnnnnnnnnnnnnnnnnnnnnnnnnnnnnnnnnnnnnnnnnnnnnnnnnnnnnnnnnnnnnnnnnnnnnnnnnnnnnnnnnnnnnnnnnnnnnnnnnnnnnnnnnnnnnnnnnnnnnnnnnnnnnnnnnnnnnnnnnnnnnnnnnnnnnnnnnnnnnnnnnnnnnnnnnnnnnnnnnnnnnnnnnnnnnnnnnnnnnnnnnnnnnnnnnnnnnnnnnnnnnnnnnnnnnnnnnnnnnnnnnnnnnnnnnnnnnnnnnnnnnnnnnnnnnnnnnnnnnnnnnnnnnnnnnnnnnnnnnnnnnntgcctttggaaactgagtctccagtttagtgaaaggaaacaagtctcattttactctccctgtataaagctggcctgtggacagtttgccttctgtctcagtagttgaggaggagaaaatcctttttgttaactattcctcttggcttttacatgcgcagaacatttaggctggtcaatctgataggtgcctgttagtttcctggggctgctgtgacaaatgatcacaaacttggtgtctgaagcaaggcaagtttgtattttcattgctgaacgctcagagtccagattgttcatcagttggtcagttctgaactctcaaagggaaggccacttgccggcctgcctgggtgttctcagtcggtcgcagctcactccaggcttccttcccgtggtcttttctgtgtgcctcagtcaactctctcctttttctcataagtatggcagtcactggctttagttccagcatgatctcaccttgagcttcttaattatatctaccgaagtccctatttccaaataaggtcacagtctcaggcaccaggggttaggaatgggtatgtatgtgttcttggtaccctatttcaacccaccgctacagtgagttaccctcaccgcaaatttgctaataagcaggtgaaagtacgttttaccaaatgtaataatagatatggattagctacgtcacactctaaatgcaatttggaattcattttcgtggtttctcttcatgtggcttgcggctgatgtggcagtcttgtgctgtgaaattaggcagaactcacgcacaagctataatttaagcctttaaatggtgtgagcaaggtcttaaattctgtgactgtgccgttttgtcttgacttttaaaaacctacattcctggttatttctgtaaacgtttttgtggttccttttaatataagtcatgtttgtctccacttaaaagactcacggttcgtccagcgatccagcctaagttaaatttgtgtgccacgagaagggaatttttacaaaaacaactgcagcttgccagtgggtgtatgagattaagattcgggagtggaggctggcccagcctctttctgagaaatatgggcccggcctccaggcatgtggtttggagggaacctgccgaggacattctttcttcttccccattctgagaggacagccccccgagaatgtagttcttactgtgggaacgaagttcttactgtgggaacgaaatggtaaagcttgaggtgaattcacagctataccgtttgacattacagtttataaaaacaacagcccgtctcccttctcatccttctacccacattagtctggtgtggtattttgtttcatgcatttcaagaaatggtcatctgttcttgtgcttgtgttttcgatgctgaaatgtaaagttcagaaattacaccaccagccgcaggcaggaagcgtcccacaagtatctgctgaatgaatgaatttagtgtgctgtggatactctgtgtgtgtgtgtgtatacacgtacacacatccagtagtatgtgtgtgtgcccgtggagaccagaggccaatgtcaggtgttttcttctattgctgtgttttgacatagaacctttcactgagcccttagcttgccctgatggctaccctgactgacgagcgaggagctgggatccactcatctggaactcatactcatctaacaaccacttgacccacggagccatctttccagcccttggcttcttcctttcagtggctgcttactgtcctgtgctggatatgctgtggttcagttatccagtcatttcaggggcatgcaggtcattccctttttcccagcagctgctgctgagacacaccatgctggtgtactgctggtaatgtgtcgtgcgttcccttcatcccctgctatgttcctgtgaagtagcacattaaaaatacgttaccaaaatgactttcagacttacattttcctaaatactctttttttgaagacagggtctcactgtgcctgttctggcctccattcaacagaggtcccttgatttttgccttctgagaggtaagattaactatgtctgacctatataaaaatgtttttaaaccaatgaaactttttttccctcagaaccttgagagaagtaccaggcgtgatgtatggatgcacactgtcctgattgtgtctggaaggttcttgaggcatgccctttgataggaagtattagaacccctctggtcattgcctggcaaggcctgaaggaaagccgcattcagggagagagaagagatagacacaggctaagtagtaaagaaagaccttgcttgtctaaaacaggtgcttaacccaaggggagctcgagttcgagaaacttgggctctcctttccgcctgctatataagcaggttacacagccattttggtaatctctttcttccagttgccttgtctgtgtgtttaagatagagcagagcctggtccacgctggaggacacggaagcactctttgttgttgctgttctcaatgccatgtctaccactgacacctgtttatctttgccaactttgtaaactactttctccttctgactgcctgacttttttccttaaaaactttttattacatgtgattacttagctgtgtgtgcaagtacacacataggccataacatacttgtggcggttagagacagctcgctatcgtctaagctgatgggtctctccttccaccacatgggtttagagagtcaatcatggctcctcaggtttggcggctggcacctttaccagctgagccatttccatctcctggctaccattttctttgttcttttccaacaatttttcaattttcatcaccccgcccccatgggcattttccccaccctccagtcctggacaccacccctacttccctctgtctgatcgtctgatcctaggaccttgcttccagtgttatgcttccctccattatgccgcgaaacagacatgcaggaagtgtgacaacagagcatgggtccctcttagttctcagtcttctccctcctgctgcctggggaggctccatagatgagagtgccattcttccagttagcggtgaagtcctcgtaccatcaagtccctctgacagaccctgagtcaacatccgatttgtcacttactggcctctccacacacagatctggctacttcttgtcgctggtacagccaccatcccagggcaaaccattgctcttcatgatttatcaaaagtttctcaggtaggtgccagcttcaaatgccagtggtttcactctttgaatacattccagagtcctcactgtggcccacaggaggagcctgcctcctagtgacctcaggggctagtcttgctttctatgtggccacttcctgttgctcctccagccccacagggtttcactgttagttccccctggatcttctctttagaagctgcatggctctcgccttctcgccatctccgcttctctcatctgtgtcatgatcagtgaagtcttctttggtcattgtgttctgttctcctgtccacatgacactgacagtctcctttttttcttcagagtccacatccctattgatttatttatcaatgtttatttgttgatggaggtccttctgagaacttgtaagcggggtgagaagccaggctttgaaccccagctcaagtacagtgtgtttggcaggtatagcttccttattggtaagacctggtgactctgacagattcacataaagttttgttttgttttaaattaattttatgtgagtacactgttgctatcttcagacacaccagaagagggcatcagatcccattacagatagttgtgagtcactatgtggtttctgggaattgaactcaggacctctggaagaacagtagagttttttttttgttttttgttttgtttttgtttttgttttttgtttacatgagctcctggttttatatctacagacttttctctgttctagaagagttaggaaaagaaattgggatttaggacattggataggtggcaaaggttacagctctgtgtgagttggccatctacctgcagataaagcagccttccttcctttctatgtgtggaagggacaagagccaagttttgaatttatattttgagccaagccaatatagcaagtatgttacaatatggacttttcaaatatgaatggctatatgcattttaatggtaaggaaattaagtttcaaaagatgaagaaacattctctgagggaggggacgggagggggaggggaggggaggggggatttttgggataacattggaaatgtaaatgaagaaaatacctaataaaaaaatggaaggaaaaaaaaaaaagaaagaaacattctcctggccatgtagcttttgagtgagatgacctggtctgatgacccagtggaggctgtactccttccagtatttactgtgcaaaacctagagaggggtgcatggtattgcaaggctagagaattttcccatgttgcatttcagtctttattacaaactttggcgagtaattatcattttaactttgcaagcaattaaccttggtgtatctatagggatctggggttgactgtaaaccctacagctaagacatagcagagattcaacttgtagcaaaacttttcttaaaacctaacattatttttgacacattgtattagctaaatacatcacagtaccatagaggtaggcaaaaccttgatcagaaagaacaaattcttctcttacagctaaaagcaaagagagggactggatctagcttttgttgagtttaatgtatctgggtctttcaaaacccttgtttctcttttcaaaagagaaacaaatttcaaaaacttgaagtatttcctcctactcatatctctagaaactcagttctttccttgtgtagtagaagttgattacttactttatatatttctagaaacatttaatgcacatagagcaaatatataaagtgagcacctatgatgaggattacgatgattagtacacagagttattctgacttgttttgctttgtgatatggatgctacatgcagggccttctgagtgctaggcaaacctccacccttcacatacctacccagccctgagtaagggctatattgatactgaaagaaccgaaagataattcaataatgaatgaagaccttgaatgtgttggtttttcacagataaacatgcattcctaatatagatttcttgaagtaaacttgttgggtcaaagtttatctgttttttatatatgtgtatgaatgtgcgtgtgtgcgtatatgtgtgtttgtgtgtgtgtgtgaaattaattttcctgtgctagtgatggaacccaagtagtgtgcttggtgagttctcaacggtttacccatacccctggcccttgtggttttttaaagccttgacacacttgagcctttactactacaaatgtagaaacagcagtttgaccttgaaactactcttgccatctttatggtcagtagctgcttatttagttactttctttctttttatttatttatttattttagttttttgagacagggtttctctatatagccctggctgtcctggagctcactctgtagaccaggctggcctcagaaatccgcctgcctctgcctcctgagtgctgggattaaaggcatgcgccaccattcccggctttagttacttttcttatgactggaaaaaaatatgtgatcatagtaacttaagagaatgatctatttctgtcatggtttaagagaaaacacagagcccatcatggcgggaaggcagggcagcaggaacatggggcagccagacgtgcatctcattgttagttgtgtagcagagggagcggacgctggtacttttcagtttctcttttgttccttcgtcagaaccctagcctgtgggatggtgccactgctttcagggtgggtcttcccttcttaactaaacttgtctggaattagcctgtctcctaggtgatcccaaatccagttagagcaacagtgaagaaccattgcaccatctgtaattaaattcatgactgactatgtcacaggggcaacagcgtcagaaaaaaaaagtgtaagctataaactttgatattagcattgcagattgatgaatacagcacagaagtggtctggcaaatttatctgtctgtctgtctatttggtcagacctgattaggatcctagttttacgaaactactgactgtgacctttgatggattatctgaccataatcagttgagtgagccttagtgattttatctgtgaaatagggatagtaacatcagtcgtacagacacaagacatggtgctgttgatgggacggacctcagatctgatgaaagagtgaacctggtgtgggcacgggagtgcagcgtgctgaggaagctcatggctggacggaggatggatgctagagtgggattgcagcagtgggagcttcactctggactgggcgagtgtgcatgggaggagaatagccatgggttgtttgtgaggtgtgggcagttcctgcccagggtctgggtgtatgctggacttcagagacttactggggatagcagggctttgggccccagtctgaaatttagaaatgggatcctgatttatggcaaggagatttgaataacaatgaggctatggggggaaagaggcaccaattgttatttggtaagggatttgcatccaaaatttagaaacaactttttgagacagggtctctccatgtaaccctgtcctgtctggtctggaacacacttttgtagactaagctggccttgaactcagtgagatcttcctgcctctgcctccccagtgccaggattaaagttatatgctatcatggctggctataaagtagtttctcattccatttagaagtgggcagtgatttgaatggacattcttactgagaagattcacacatgaccaataactatacaaaaaagacactcagtatcccatagggaaatacagaccaaaactttggtgtggtaacattttagtgtctggtagcggtggtaatcagaaagacattagacataagtgagatccacgggacacaagggcctcagatgcatacagacgcacaggagtgtgctgtggcacaaacctgggaattcttcagaaagttaaaagtagcattcaccaggattcccaggctggcctctgaatacaaggccagcctggcctacatggttatgtcagccaaagttacatagtgagaagctgtctcaaaacaaaaaccaggctgggcagtggtggtgcacacctttaatctcagcacccaggaggcagaggtaggtggatctcttgaattcaaggccagatggtctacagggtaagttccaggacagtcaaagctgcacagagaccctgtcttgaaaaaccaaccagccaaccaatcaaccaactaatcaaccattcaaccaaaccaaaaacaaacaaaaaacaaaccaaactaaaacacccttcccaaagtcaaactcaaacaaaaaaactgacccaaatagaaaagttactatatgatccagtcattaaaaatatgcttttgaaaagtggacatgaatgtgtcttttcttacacatgtactacaaaaactagtattcatgtatctgcccaaatttggctttcctggagatagtgaatggatatagtgtgtttaaaactggcataaaacaaggaatgagggtgaacatgaatgaccttgagaagaaagaaagaaagaaagaaacaaaagaaagaaagaaagaaagaaaagaaacaaagaaaggagaaagaaaggaaggaaggaaggaaggaaggaaggaaggaaggaaggaaggaaggaaggaaggaaggaaggaaggaaggaagagagaaagaaagaagccaggcacagaccacattctatgacaccatgttcaggagatgcctagagagacagcaagagcaatgctaggttggtggctttaggggtgggtgttgggggagggaaactggctgctagtggataagggagatgttttggggttaggggggcagtggtgatgttgcacaacctctaaagactgaaaaagcctagagtggactttgcaccactaaagtcacctgagagattgctcagcgagtaaaggtactggttgccccactacacctgacaacctgagttagattcccgagaatttacatggcagaaggagagaactgagttctgtaagttgccttctgatcttcacatgaacattgtggtgtgcacacacatatgcacatatgtacattcagacacacaaaatcaatactgtaaaaagaaaaatacaggaaaagtatgatcggattctgaaaagagcccggatttctgaagagattattattgcaagaaaagattccagagacgaggccaaacatacaaactcacatgggagctaggccgccttgtgattgggaaggtcacggccagtataaaagatcaggggtcaaatagaagcaatggtcactctcttttatgtcaaggtcagatgagcaccaaagctgacgactctgcagctgtctatactggctctgaggcccgtgctgaccgattggcagagggcttggaacagggagcagagtccagatgaagccatgacagttgtatgcctcagaggtccagctaaggcgtgctattcaggcagccatggtccctgtgagatggaggcaaagaaagctaagttagggagcagctatgggagtacacaggatgagggaggtgtgtgagtaccctaagagtgagtttctaccaagcaaggaccgaaacactcgaaggacatgcttgaactctttcgtaggtgtgtgtgtgtgtgttaaaaagttaaatctttcctctgcattgaagttttgcttgaatgaatgtctttgtgaaagtcacatcttagagttacagacacttgtgaactgccatgttggtgccaggaatcgaacctgggtcctctgaaaaagcagccagtgcccctcttctaagcnnnnnnnnnnnnnnnnnnnnnnnnnnnnnnnnnnnnnnnnnnnnnnnnnnnnnnnnnnnnnnnnnnnnnnnnnnnnnnnnnnnnnnnnnnnnnnnnnnnnnnnnnnnnnnnnnnnnnnnnnnnnnnnnnnnnnnnnccttccataattttatttatttagaaagagactgttgattaactcagacccttcacaggggcagagtgatatgcagccaggctgtccttgctgtgtaacttctttctgtactgtaattctttttatttttatttttttttatacttttggtacagtgtctcactatgtagcacaaactggccccaaactcgtgattctcctgcctcagcactacatgcttacattataggcatgtgcagataaacatgactaattcttattcttaaaaatttattcagggtttatgtattatctattgaaataaaaatacaaaaattactatgaatttaaaacttaaaattttttggttatgttttctgtgtgtttgtgtgtggagagagacagagacagaaagagagaggaagggggctggtgagatggctcagtgggtaagagcacccgactgctcttccgaaggtccgaagttcaaatcccagcaaccacatggtggctcacaaccacccataatgagatctgatgccctcttctggagtgtctgaagacagctacagtgtacttacatataataaataaataaatctttaaaaaaaaaaaagagagagagggagagagagagagaggaagagagagagagagagaaagatagagataggttgaggcagctcatgagagttgattctttccttccaccctgtggtaccagggattgaactcaggtctttagatttggtggcaaaagccttttcccacagagccatttctttggctctgatagcttttattatgttacatgaaataggccattgacctactgttgcccattgcctgctaactattatgtcagctccaaaagataagtaggtggctgtacaggaacaaatggtttgtaaatgtgattagtgggttcgtgtgtagctgtgtcgttggtaacagagttcagcttgtctcatccccaaatggtttatctgtatgaacagtgcttgtggccatcatggccccctccctcctgtgcagttttcaagctgcacgcagaatgtttgtgtcatcttgtccactcaggtgtgaataacctgtctaacaggttaggatcatggagggacggggaggagacaggaagggactaaaaggagcttcataaggcaggcctgctcaggagctcacaccatgaacttgtgatttgcccccgagtgatttttcttccatggagaatggagctctttttttgttttgaccagaacattactgataattcctttttaattcagactgtttgggagaggggccagtgctgagggttgatttcaaggctctgagtgctccttcactcggtgcttggccgccaagctacaccgccagcccagagtttgctttccttaaggtgacctggcttgctgcagtgtgctagatttaccccggaatatttcacctgctactgctgggtgagattgaggggtccgtggggaattgttacttttaatttgggaacagaggcgggtgttaggtgacagcgggtgttaggtgacatggtgctaagaatgttgtttttagaaggaagcagaagcttgggaagagccatgaggaggggaaaggagagcagcagaggctgggtgggcaggaggctcctcctccatcgggctggctctgcacttggggaaagccagactcctactttctgcttcctcttaggcctggaagctgatactgcctcaggactgtatgtcttgtgttctggactatggggacaaccacagcctagaaaaaaattccctggggaaacaagactcctctaactgacgtagaaacacactctgcagcagagcaggctcgtcatgcactgggctgggcttcttggtggtatagtataactagtccgttcacccccagccccaggtcgtggtgggggctgtgcacaggagctgatggtctacagagtgacctcgagtcccttcacaccctgctggcgttaggcggtctgggacaattagtgtttaccagaggtctcagttttttaaataaaataaactaaaggggttccggacttagtgccctagggcgtttattatgaccatatctgtaattcattcattcattcattcattaaaaatataattgcttgaggaatatcaatcacatgggaacatttgacaaaggttagagagggcggtggtgagaacaaaggttctctgtgccctgacagctgctgctacagagagactactacaggaggctgctctgcccacagctgcctgtggctgaggtgctggtgtctccagaggaattcccactgcatttgtttagtgactagagactgctgatggctaagtgtcctcaccagctcagggaagtgggttcctggctccccatcactgatggctttccccaccgccgtattttgagattgtggctgtgtccaagatggcaaggcccttactatggggaagtaaggtgtgtgagctgtgctatggagtgtcaggtctagagctgcctggcccggggagttcatggtgggatttttttaaactggaacaaaaatctgtttaattttattgaagtcccaaagatggagaataaagcttgtggtgccccattctcctcattccaaggacatcgcacgcttaggtcacactcatctccaaggaagtgttcaaagttcagggttctaataagaaagcttgcagagagctgcgatgtgttctaggtgccttctttccatttctagggagtacacgagagacttcttccgtgtgtgtgtgcatttgtgtgtgtgcatgcgtgcacatgtgcatgtgcgtttgtgtgtgtgtgtctcccagttctctcttgaggccaagaagagggtgtcggatcccctagagtactggttctcaaccttcctaatgctgtggctgacccccaaccctaaaattatttttgttgttacctcataactataattttgttacttttaatgaatcgtaatgtaaataccagtgttttcctatagtcttaggtgaccctgtgagaaggtggtttggaggaacccccccaccccaaggttgagaactgctgcccttggggttgttggagttatacccctaggggtagttgtgagtcaccagagtgactgaggatcaaaatcagacccgctggaagctatggagttttaccattgagtcatcttggctctgacccttgggttgcctttgaagttctctttatgtaggccaaatggtgggacctctagcagtcctctgagagcttggccttgtgggtgcacacgctgatcaggctgggaatctgcagatccatatcgcaagagggtggagtggagggaacggaagaggctgcaaggtgagctgcctggatgtcctgactgctgggtggagcccacacaaagccacctatacagggacgccacgcactgatggctaactgacagatgacgacttgcaccaggagggacccatgaaagcctctttgattcagggttgagagttgtaagtaggtttctctagagcctgagaattttatgtcacacaccccattctagggactctcccaggaaacccacaggcattcatgagaaagaacatcaaagttgattggtgtggtctttgactctatgctctccttcagttcctacccaggagccagagataatgttggtgtggagcaggagagatgcataataaaggacagtgctgccttggccacccgtgttttactgaggcggggctgggtggggggttgccaggtgagtgccggcaaatatgatcgagacaccggaagaggtgcattgaatgttgaaattagaaagttcctgaaaaccacttgaagaagatactagttacagagtgaagacaatgtgtgctctcttggattctgttcaggagcaaggagcaacttgtagaagggcctagggagaagtttacatgtaaagcccagcggggttatttatttatacatgtcccacgtgcacatttgtgaaaaggggaagtgaggtaacaagagagacactgagttttactcagtctacctcatggctctgaaaacgggtaaacaggtaggtgttaattacatgctaattatatatatacacatatatatatacacatacatacatacatacatacacacacacacacacacacacacacacacacacacatataatcagatatgccccattactctccttctactgactctatttctcttcctacctagtccctctttatttgcctgtagattttatttttatgactcagtgagtttcattaggttgtttacaggatcctaggtgagaaagtaagattttttttttttgaaggttaagagccttctttgtgggcatggctggaaccttgcaccttgtgcactctaggcaagcgctttaccacagagctgccccgtcagccccaggggaagaggctggcatgggaacatgtgatcattttcccgtgagagtgtggggtatatgcactgtaatttaataggcctactgtgtgtcatgtgttgtgctctgtacacgtgcccccccctccccccaaggcagtgaggttttttgtttgttttttttctgtctcataggcaaggaagctgaggttcagacgcacacgagctgtgtggtttcctacatggaggacaaacagagctaatttaccctcagtctctttctgcttctctctgctgcctatacacacacacacacacacacacacacacacacacacacacacacgggacagaggtggggaaactcagccagcgtgtcccacactgggtggggagaatagaggacatggtggtcactcgagactggcagcctgattcccagggacaacggtgtggacttctgttccttggaagagggaatgggtccttgcacctcttatctaggaggttatcttccttcttgccacatttaaagtagactttgggttatgcctaccttatcctttttaaaagcaagatttatttatgtattttccgggcctgaacgctttgctatccgtgtgtatgggcgctgcatttgtccctggtgcttcaggaggacagacttttgatcccttggaacaagagttacagatggttgtgagccaccaccacgtgggtgctgcaaactgaacgctggtcctctgcaagagtagcaagtgctcttacctgctcagccacctcttccgcccttgcagagttattcagttcgcctaagggctcaggcatctgtccagcgtggcttctggacttgactttcaatcccctgactgcataatcatgcatcgtctcgccttgctgcctgcagccagcctttataaatcctctaatcaagaaaccaagcagctaccaaatctcaggttctgctctattttgtcatagggaaatgtaaaacttgttctgtgggtaaaagtgtctgtagggccatgctgaatttcagtgttcagggtaggctcttaaggactttgcatctagactgtttcagaatcccctcccaagagaactgggcaggacctcaagaagatgacaggggtgtgggtttataaatcttgccttttctcatatttttggaaatattcttccttatttcataggccaatagaaaatttggtattcagtgaatttttattaaataataattcttaggctctgatgaccttattagcattgggtctgaatttaaaccgtagtcttcctgcttgtttattgagtggccttgaagaagtagtgcagttctctgatgtaaaaatgtttgtaaaaggggggaatctgttggagggtccttgtgaggataaatgagaaaatctactgagtaataagcaaggcagatgcgcagccgcactgcctgcaggtcttgcctggcctgtgatttgctggggaaggccttctccttcctctctggcagtgttcctgtctttaccctgcttacattctggctgggtgggggaaggaatggatgatttaaggttttttttttgtttgttttgttttgtttttgtttgtttgtttgtttgttttttaatgtacgtgtgtagctgagagagggcaggagcagggaagagggagaaagaaggaggaggcctagaaagtttcctgaggtcagctcaggatgagggcatgaacccttagcttctcgatttgactatgcagttctcttcattttattagcatgtatgaattatacaataatgactaagtgatagccactcattttgatcgtattcactcccattaaccgatcttgcccttcctcccacttctgcagaatcccccacccccacccctgtcttcccaaatctaactctgtagcttttacagtttgcatttttttgttgttgttttgttttgttttgtttttttgtttttttcaagacagggtttctctgtatagccctggctgtcctggagctcactttgtagaccaggctggcctcgaactcagaaatccgcctgcctctgcctcccgagtgctgggattaaaggcatgcgccatcacgcccggctcagtttgcatttttttaaaaaaaaaaattagggtggaatctgtcagatacatgtagtagttctgttgtccatgtaacacacctgtgcctttcaatatctgatactttgagagattttttactttttttttaaaatttattattatacccttccttattcactgtgtccttttaaaagctgccaagcctcccgagtgtggcatgggctcagatatgctcaggcttgtgtttgccctgtcctgtagtccctctgatccagccccctttcctcaccaggcccgtgagacttaacccaagtgctggatccctagtctccggtgtggaccagactccaccctgtggcagtgtttgggaactgcactttcacaccgggctggctttaagagaaagtggttgtcgccactgccccttggaatgcggaagggcaattcattcttgtcacctcttccccattttcctgctccaccaagcctgctgccagtgagtagtcctctttggaggccaagcagagagttcgcagactgaggctatggaagcgtgcctgctcacctgggcgtaccattttgtagctattgcagacaaatttacccagaccagatcgtatgggggaaggcagtagatctctctgcgcaagtggaataacttatccagtgtgggtggtctccctgtcctttgttctcgccaggactcccctccacatatcctttaatgtgctgccggcaaagccccaggaaacccaccctcccttctgtagcttttggtctaccctgctttccgctttctagtgctgtcccccagcctccatgttatctgctgctggagggtttgtttgtttgtttttccttggacagttactggggctctgtgaacacagttcccatgcatagtggcagccatacctcttaatttgtgttgccttctgagcaggcatggttttacacttcatgtgttttggggttggcctgtctctatccttcttactgttttgttgctgttaggaattgacctaagcatgtctggcaagcgctctaccaccaagccacagccccgttgttcctaacagtagattgggtgttctgtcaaagggacagtgggacctgttaaggggtacagagtgggtatcacccatattactgatataacttcaaacaaacattgtaggaaaattacaggaggggttctggtagtgggaaatgaggcacaaatcaaactggaaagttttgtgttctgtggaaagcaactaactacgggtcccctgaggtacacacttgtttcagctctgtaggagactgaagtggaaggattgtaagctcaagacctgtctgggcagcttagcaagactgagtctcagaaatcaaagaggagggcggggatgtggctcggtgttggaaccgtgcctgatctgatctgattgcagtttcagtccccagcactccaaacacacaatcaatcaacaaacaaacaaacacaaaccatgggttctaaggaggaagaggagagcgattgccatttgtacgttttatggttgtaatctttacacatacaaatacacaaatgctaaatgaacaagatagattcatgcctgtgtgtttatctgtgtaattactgctcagaccctgaggatattttcagaagcccggatgggagctgaacactcagactgttatgaactcagaacactgggttcatagcactcaggcacacattccagaggctcatgcagggtctgtggggtaactgggcctggagttgttagagctgccttccctcccccaccacagaggaacacagctctggactttgaggaaagccattggttcagcgtgtggctgccggtgacagcagcccagttacggttgtggctgaagagcagcagcctgcctgcactccttgatccctggtttggtaggcctgctcctgcctcagtgttgtctctttgctgcgagtgctgaagggccggcctggacattggcttcagatcctgcagcttggaagtagcagtgagagttaaactcaactttgccggagactttcttctctttaaaataaagatttatttttattttatgtgtataaggtttatcctgcaggtatgtctacacaccatgtacatgcagtgccccatgaaggccagaaatgggcatgggatcccacatggccatgcgggtgctgggaactgaacgcaggccttctgaggagcagcaggtggtcttaacccctgagccatctctccagccatagaaactgtgttttattggtaaccccactggctcattgtttctaagttcaagtgttgttttttattctttctttctttatttgttatctatagttatttattcaatcatttgtttgtttgtttttgaggcagggtttctctgcataactgccctggccatcctggaactcactttgtagatcaggctgacttcaaactaaccgagatacacctttctctggctccctggtgtgtgcctgtgtaccacaaccagctctattgttttttaaaggcagggtcttctgcatcccagactggcctagaactacatatgtagctgaggcaagcgcaccgctgcagcaggcttatgctggagattagtgtaagtggtgggccagagaaggggctcagcaattaagactgcttcctacacaaggttgaggcttagagttaggacggcagcatccgtggaacaagctatgtgtgctgtacactccaacgctgagggtatagggacatgaggtagccaatgctatctggttgctgttctagtcacaaacctgggagttgtaggttcagggagagactgactcaaaaggggtaggcagagggtgatagaggtggacaaatacattgtatgtggaaatacagaacatgtgtgtgcatgtatgtatactctactaacactaagatgaaaaaaatatgtgggcagatgtgtttaatgagcagataggaaagtggcaatcttaaaatattaagagtgtgttctagaaattatccttcaaagcaaacttgtgcaggcactaaaaggaaaatcaaacaattgctgtggccttcaagggcctgtaaaccaacagcagcacatgccgctgccttcatttagtctcacagaacactgatgtttgaagagctagcacataacttaagcaatgtgtcaagtacgtgttcacttattccttcgctgtgtttttagatggaggagtgaagtggggtagccgggcccttgtcaaacgcatacaaacagagctcagttttatccttgtactgcaaagggaaggagtcatgagattcaggcaggaagcatcagattgctgtgaggaaacacctgagaaattcatcatgagtcaggtgtaggtgcacatctgtaagctaatgcttgatgtataggcaggattattaggagttcaaggtaaccctgggctacgtgagaccctaccatgggaaactggtccctcacctcccgccccgttcccctgcaagtataagcagcttgctttatctgttcagactgaggtcatgtcgggtagagcacagcagagaggctgccaggtgctgctgtggtcactctgagaagagagagtgccagcaagcccgctcaggatcattctcatacctgtttgacatgcagacagggtggtgacggagccgcttcctactaaaagctactgctgtcggcacgtggctcattgctggctttgtttaatagctcatgtctttgaatgaatgtgtcaggaaggaaatagaattatgggtaatgactccacatttaaggctactcctaaaatataaatgaaatgtgaaacatttctttccaaaataaaataagtatgcaaagcacagtagcaggcaggccagtgtctcgtctcgtctcctctcctctcctctcctctccccttccccttccccttcnnnnnnnnnnnnnnnnnnnnnnnnnnnnnnnnnnnnnnnnnnnnnnnnnnnnnnnnnnnnnnnnnnnnnnnnnnnnnnnnnnnnnnnnnnnnnnnnnnnnnnnnnnnnnnnnnnnnnnnnnnnnnnnnnnnnnnnnnnnnnnnnnnnnnnnnnnnnnnnnnnnnnnnnnnnnnnnnnnnnnnnnnnnnnnnnnnnnnnnnnnnnnnnnnnnnnnnnnnnnnnnnnnnnnnnnnnnnnnnnnnnnnnnnnnnnnnnnnnnnnnnnnnnnnnnnnnnnnnnnnnnnnnnnnnnnnnnnnnnnnnnnnnnnnnnnnnnnnnnnnnnnnnnnnnnnnnnnnnnnnnnnnnnnnnnnnnnnnnnnnnnnnnnnnnnnnnnnnnnnnnnnnnnnnnnnnnnnnnnnnnnnnnnnnnnnnnnnnnnnnnnnnnnnnnnnnnnnnnnnnnnnnnnnnnnnnnnnnnnnnnnnnnnnnnnnnnnnnnnnnnnnnnnnnnnnnnnnnnnnnnnnntcccctcccccctattctcttctcatctcatctcatcttgtctcttctctccccctctctctcttttacactttgcttgatgagttgctttctgagtttaggtggccacactgagatgtgctacttaagaattgtgtccctagaactacactgcctgcttccaggaacccttgcctgaggagtggctaattcctttgtcacaggcttctccgtggaacaagctactccttcaagccagtgggaaagtagcccaaggacgtcagccttggcaaagccaagggatcttgagaagggatgatgtcagtgtcccttccatgcccttcctgagaagtgagcaatgttaggagcttgctttcccatttacttatgtatcattcatctatctaatcatccatccatctttgtctgtctgtctgtctgtctgtctatctcagggactccctctgtagccctgtattatttagaccaggctggccttgaattcatagagatttacctgcctctgcctaccgagtgctgggaggtctgagccactgtgcctgacttctttaatcttaagaggaaattgtgattccttaattactcagtcttgaagatgccagttggaaggctttcatataaagagaaatataatttaaggaaaaggtacccagagatctcagtgaaagcacatgattgctgtggatgcatgcagtcttcatgccagtctcttcaagcacgctccgtcttcctgccatctccatccttatctgttttggttcttacaactggtgcttaccaaatctgagtaggtctgaattacagtttctaattctcctagatacttagtactaaacaattggnnnnnnnnnnnnnnnnnnnnnnnnnnnnnnnnnnnnnnnnnnnnnnnnnnnnnnnnnnnnnnnnnnnnnnnnnnnnnnnnnnnnnnnnnnnnnnnnnnnnnnnnnnnnnnnnnnnnnnnnnnnnnnnnnnnnnnnnnnnnnnnnnnnnnnnnnnnnnnnnnnnnnnnnnnnnnnnnnnnnnnnnnnnnnnnnnnnnnnnnnnnnnnnnnnnnnnnnnnnnnnnnnnnnnnnnnnnnnnnnnnnnnnnnnnnnnnnnnnnnnnnnnnnnnnnnnnnnnnnnnnnnnnnnnnnnnnnnnnnnnnnnnnnnnnnnnnnnnnnnnnnnnnnnnnnnnnnnnnnnnnnnnnnnnnnnnnnnnnnnnnnnnnnnnnnnnnnnnnnnnnnnnnnnnnnnnnnnnnnnnnnnnnnnnnnnnnnnnnnnnnnnnnnnnnnnnnnnnnnnnnnnnnnnnnnnnnnnnnnnnnnnnnnnnnnnnnnnnnnnnnnnnnnnnnnnnnnnnnnnnnnnnnnnnnnnnnnnnnnnnnnnnnnnnnnnnnnnnnnnnnnnnnnnnnnnnnnnnnnnnnnnnnnnnnnnnnnnnnnnnnnnnnnnnnnnnnnnnnnnnnnnnnnnnnnnnnnnnnnnnnnnnnnnnnnnnnnnnnnnnnnnnnnnnnnnnnnnnnnnnnnnnnnnnnnnnnnnnnnnnnnnnnnnnnnnnnnnnnnnnnnnnnnnnnnnnnnnnnnnnnnnnnnnnnnnnnnnnnnnnnnnnnnnnnnnnnnnnnnnnnnnnnnnnnnnnnnnnnnnnnnnnnnnnnnnnnnnnnnnnnnnnnnnnnnnnnnnnnnnnnnnnnnnnnnnnnnnnnnnnnnnnnnnnnnnnnnnnnnnnnnnnnnnnnnnnnnnnnnnnnnnnnnnnnnnnnnnnnnnnnnnnnnnnnnnnnnnnnnnnnnnnnnnnnnnnnnnnnnnnnnnnnnnnnnnnnnnnnnnnnnnnnnnnnnnnnnnnnnnnnnnnnnnnnnnnnnnnnnnnnnnnnnnnnnnnnnnnnnnnnnnnnnnnnnnnnnnnnnnnnnnnnnnnnnnnnnnnnnnnnnnnnnnnnnnnnnnnnnnnnnnnnnnnnnnnnnnnnnnnnnnnnnnnnnnnnnnnnnnnnnnnnnnnnnnnnnnnnnggctgcagcaccagctcggtggttaggagtgtgcactgtgtgtgtgctggagcaggctcagtggttaggagtgtgcactgtgggctagagcagcagcttggtggttaggagtgtgcactgtgtgtgcgggagcaggctcagtggttaggaatgtacactgtgggctggagcagcagctcggtggttaggagtgtgcactgtgtgtgtgctggagcaggctcagtggttaggaatgtacactgtgggctggaacagcagctcggtggttaggagtgtgcactgtgtgtgtgctggagcaggctcagtggttaggaatgtacactgtgggctggaacagcagctcggtggttaggagtgtgcactgtgtgtgtgcgggagcaggctcagtggttaggaatgtacactgtgggctagagcagcagctcggtggttaggagtgtgcactgtgtgtgtgcgggagcaggctcagtggttaggaatgtacactgtgggctagagcagcagctcggtggttaggagtgtgcactgtgtgtacgggagcaggctcagtggttaggaatgtacactgtgggctggagcagcagctcggtggttaggagtgtgcactgtgtgtgtgcgggagcaggctcagtggttaggaatgtacactgtgggctagagcagcagctcggtggttaggagtgtgcactctgtgcctgtccatgcagaggatcagaattctgctcctagcacccacagcgggtggctaagaactgcctggaactcaagctccaggagatccgatgccctcttctggtctctgtgcatacctgcacttaatatgcacaggtttgcatgtacatataattaaaaataaaatcttaatgataacctgatacaactaaaatatattatttctcgaaaatcagaattcaataaaactgatagtgttaggtaggaaggcatgtgatatggaattttaaatggggctttttttgtttgtcttaccagtcctattttgtgacggactatgatccaaccattgaagactcatacacaaagcaatgtgtgatcgatgaccgagctgcccggctggacagtaagtaaacccctgatagcttgctcacaccttatttctaaaatgctctggctttcaagtgttgcatttgatgttcctcaggttaagtagtacaactgaactattagataatcttaatataagccttttattaactctggggttcaaacagcaggccttgcacatgcttggcaaggtctctccctccgagctagccctggccacttattcactgtcatcagtctggtaggtgcgtctgtgtattggacaattcagatattcttcagcagatggaaagttctggtgaaactgatcttgttgctgtaacttcttgaagtttgtttattggggcagttggaagaaatatcaggtctcagcaattcatgtcatttggcaaatgttaaagtaggggaagtgcccatagccacttaatgggggaatttatagcttagagactttaacagtaacagtctctccccactaaagaaaaccctgccattttaactagcaggaagatcaagaaatacattagtggctgagctaagtatggagagagaaacacagagatgtatacacacagagacagacagacacacatacacaccaagacagagaggcacacacagacaaagaaacatagacatatacaaacacacagagacagagagacagacacatgtgcaaagagacaaacatacacagatagacagatggacacagacacacagagataagacatagttgtttttaaggtttatttttctgtgcatggatgttctgcatgtatgtatgtatgtatgtatgtatgtatgtatgtgtaccatatgccaaggaaaccatgagggtttcagatcccccagaactggagtaataagcagttaagacctatgtaggtgttgggaacagaacctgggtccctggaagagcagccagtgcccttgatcactgagccatctctccagccccagccccagtttcttgattgagcttacagacatcttttctgagatctgtacatggagaagataaataaccaagtgactttagagttgatttggttccatctgcttggatgtgtttgatatttttaaccttgtaattggtatgctaatatattctaactacaaaatcaatctgtgcgatgaagataaactctgaaactgtctgccattagaagattatgtctgcctctggtgctaggaatgaaatattaagacaggaatgcattgcctctcacatcaaataggaggctctgttgaggacctggtgggggctgcccttgtgagaggtgatttataatgcccaactacgccgtttgctttgttgtttttctttagttttggatacagccggacaagaggagtttggagccatgagagaacaatacatgaggacaggcgagggcttcctgttggtcttctcagtcacggatagaggcaggtcggtgcagttaatgtgtcggggacaatatgatcaaaaaaaaaaaaatcatcgtatgcacgtgtgaaagtgtcatatagaaaccaactattatatggaatcaatataatattgctaataaaaactcgagttagcagtgctaggttctgtccagattgctattttatggaattaaaattttcattttttttacagtagaaaaatggcaatacagtaataaacaatataaaactcactacctttagtttcttagcataatgtatttattttgttttttagttttgaagaaatctataagtttcaaagacagattctcagagtaaaggaccgtgatgagtttcccatgattttaattggcaataaagctgacctggaccatcagagacaggtgaggaggaggcagttctgtgctcgggaagctgtgtaaagaagcacttgatgaaagagtggaggacccgcgcccaagaaactcgtgtgtggcgcgcacacacacacacacacacacacacacacacacacacacgtgcggtgcagcacagcaccagctcgctgctgagtctggcacactaggtcgcacagaatggcatgtgtgaagtgtgaagaaagtttgggggggaattaggttttcattatttttacacggaatcccagaaagctctctatataagtctctgtgtgtttgtattagtgccaggctcctgtgatttcttggataacagctaaaaactataagttaagataattttttgtcctcttcccgtcccctcccctctcctccccttccccatctctgttttttgaagaaaatttaatcagctttcttctttaagtcgagagagagagagagagagagagagagagagaaagcaaaccatgatttaatttgtcaaactcctatgaagaattttcatttcattatgtcttcttctccacttccctttctattgttttgaggtatggtcttcctgtgtggcccaggctggttttgattctttgtctcagcctcccaagtgatgacatcataggcctaagccaccatgcttaggtcacattatataatctaaagacttacacatgcctaatttattcactgctgatccacaattacctttaattaaggaatggctgcaatgtgtgtgtgtgtgtgtgtgtgtgtgtgtgtgtgtgtgtaatagtaagtagaactattccccccacctggagtttgtagcccaggctaatctcaaaagggaaatcccccagcctcggccttctgggattataggaatgcaccatcgtacctggttttggatttttcttcagtttaattaataactgaattttctttgctctacattggccagctttaatgctatgattgttagtattagtttctttgaaactgttttgttgtgtattgtcgactatctcttttcagaacggaaccagctgtaagttagtgctacccgtactgcaggggagttcctctcgtgttttcttagagtctctgtcccacatctagaacctagcattgaaattgtctctcttgctagcgttttctcttgttttcatgtaatctgatgttaacagattctctttactttgctattgttgttgttgttttttttaagtgattatgtttgtacatagagagtgtgtgcatgtgtgtgtatgtgtgcattagagtctgtgtgttcaagccagagtgtgtgtgtgaaggtctgaggacgactttggggtcagttcactccttccaccgttacctgggatcagttcaggttgccagacttatgtggcaagtgcctttacctgctgagccatgcatgttaccagctgctgttaatagtcttaagattttgttggctaagtatagacatcaggaaaatgaattgatgtggagctgtagttgtccaacagattttaggatttttattattatttttaactatgtatgcgtgtggcttttttttccccatttttattaaggatttacctcatttacatttccaatgctannnnnnnnnnnnnnnnnnnnacccactccccctttttggccctggcgttcccctgtactggggcatataaagtttgcgtgtccagtgggcctttctttccagtgatggccgactaggccatcttttgatacatatgcagctagagtcaagagctccggggtactggttagttcataatgttgttccacctatagggttgcagatccctttagctccttgggtactttctctagctcctccattgggagccctgtgatccatccattagctgactatgagcatccacttctgtgtttgctaggccccggcatagtctcacaagagacagctacatctgggtcctttcgataaaatcttgctagtatatgcaatggtgtcagcgtttggatgctgattatggggtggatccctggctatggcagtctctacatggtccatcctttcatctcagctccaaactttgtctttgtaactccttccatgggtgttttgttcccaattctaaggaggggcatagtgtccacacttcagtcttcattcttcttgagtttcatgtgtttagcaaattgtactgcatgtggatgtgtgcacatgagtgaaggcattggatcctcaggggctggagatgggtgtgagccacctgatgtgggtactgggaagtagtctggtcctatggaagagcagcaagtgttctgaaccactgatccatctcccaacccctgtaaactattttgcaagcatactggatttcagacatgaggggatgattagcctacacatgatgggcagtggtgttcagcttgttggcatttctatgtgcagctgtcatctacagatggactggactgtgttggtggctgatctgggaggcctgtagcatgtagactacaggcagtatatacttggtctcacgctaaaactcagaaagtgtcttgatgctcttagtggagaataaatgttcctgttaggcctctttctgatttgaattattacaaagttgcattgctgagaaagaatctccatagccatcagtgcaaagtgtacaattgggtgtttgttgtctccatgtcttcgcatatgaacataattacatctattatctgctgcccagggggcctctctgctgctcttctttgtatgttctaggacttgctctgctggggggtgagagggtcacaaagccacatgcagagaagggctctgctccccacctcgtgctcacttctgcccacccctcgctgctgcctgcccccattgtagaagcaagttctttctcaaatgtggaaattccactgaaagaacggaagagaaccatgggatgtgtggatgtctctggagcaggtgggagcagttgaggggagacagaccccctggaagcaacagatctcatttattagccacggatgtggtctacatgtgtttttaaaattattattattattattatcattgtgtgtaatatgtgttggctcacatgctacagcatccttgtggcgatcaggagacagcttttggaagctgtttctctcctctaccttacatgggttccagggattgaactgcaatcctaaggctggcacagcaagcacctttacctgctgagccatcttgctggcccggtgtgagttattttaaagttatctatatactaaagattgccagtatgaagcatgtagtttccatctgtctgcaggtattcaacatattgtagcacttgtctgtttatatgtcacgggattataaaaagtacttgtcagtaaaaatgtgatggcctctcagggaaataaaaaccaggagtatgagaagcaacctaggtaatcagtcacatttctgtcacctaaaagtgtgagtcaccagcttggagtaagcttttctgaattgatctttctcccaaagtgtgtgcacagacctgaattatgtatctgctggcaagctcaggtgtgcactggagagaacaaagcaagcagctgaaactgacttagtgagagaccatgtgccataaaataaggagaagagtggtggaggaggacagtcaactgagacctttggtttctacatgtacacacacacacacacacacacacacacacacacacacacacacactcctactttagacagaaaatggagactattgtaggaagagagagaatctgtgactacatgaagttttttcttcgggtaggaagggatctgccataactggttttctcagtacagaaacctttctttcttcacaagctgtcctatgaagcctactttctaacttactcttacttgattgaagaatctggtatgtatttcaacctcatagccttagggcaggcatgttattttgaaggaaggccaggaaaattaaaacattatataactgttgctgtgggacaatactgtgggacctgtgtgctcctctgttgagctgcagcagggcatggaccacaggaagtagccttgggccttacagtagtgaatggtttcagggtttggggaatggggctttaaatcccatgtatgtacttagaaagagatcacgtaaataaagaccaaagcacagctcctgttatgaagaccagtcacgaaacccaggagttatagaaacactggactcagtagagagacactgaacagatgtccactctcttccaacaatacgaggctatagaaacaccgtctgcatgaggtagaagtgatgtgggctgtatacagagatcccagtcaagcctccagaagcccaagctaatgagatgacaattgcaccagatgctattgaccgtagaagtatactggccgcagagttccaagtttggtggaaactgcactgaacacatccatgatgctcagcaaaccctcagcacaagcaatagttagacaattataagactggtcataataaaactcttaatgatctacattagcaaaaaaaaaaatctgagaagtagttaagaaacacaaaactgcatgcagaggggcagaattcagggtgcagagttaatattggctgtcagtttgacaggaggagacaggcctctggggatgtcatgagggactacttggattagggtaaccgtgggctgtgcctgtgagggtttatctacattaggttagcccctgagcatttctgagagggattaactaactgagttaactgaaaggtgattatgggtgccatcattccatgggctggggacctggatttcctaaaaatgagaaaaatgagctgaacagaggcatttatcaatctctgcttcctgattgtggagtcatgtgaccagctcttgcccctatgactttcctgtcctaatggactgtactctgaagctatgagctaattaagattcgtgtgttaggggtttttatcccagcagtgtatgaagtacctgatacatcaatgtgtacagtagctaatacaggtgacatccatgttgtttctcactggaaatgatgtgagccagaagatgacataacttacacactgacagcaaaatcctggtatctagaaaccaatgcccagcagatacttgctttaaaaatcaagtcaagtaaaagacgtaagaagtgtaagagttcagcaccagtggacctggataatcagaaatatgcagagaggtcctcagctgagagataatgaccccaatgagagtctgagtcagcacagaggaatgaggaacacaggacctggcagttacgtgggcaaatataaatgacgttatttaaacctctttcaagtataattaaatgtttgaggcaaaaataaaataatgtgaagtaaaagctagtaacaccagagaagagcaggaagacagagcactgtccgggcctcaggctgtgtgcaaaccggtttgacttcatcgagtatgtgcagttacaaagtagacaatgaagccactgaggtagcctagcagacatgaagtgaatcagccaatgggggaatgaaaaggcaaggtaaagtcgttcttaacctaaaaggcaggagaggggcgtgcacagaacaaagagtggaagagagcaggtcttcaggctctcaatggaaaggcaaatggtgtcagactgaatgaagaagcaaggccctgcagcttaaagacatcgcctagttacgatagaaggatgggctaaggtatcccgtgctgccaacactgaagataaagtggccatagagatagctgtgaagtatatcttagaaccagtgcattaccagggtaaagaaagctgtttcacagtcacagagactaactcaccaagaggacttactggtcctagccattcctaggcctcaaaacagcttcaaaagtcctgaagtaagacttaaagactttcagagagaaatagaaagaaaaagtgatgtgtagacagcttacttacgtaggaccaccgagcagcttgtccaactgacccctgatgaacattctttccacccaacagcacagagtctgcatcaggtcagagaatggctcatgaaacaagcctcaacaaatctgaaggaaacatcccctcagataacacattctggtgacagcggcattgatacggacatcaataacatacgaggacagctccaaactcccaagcaaatttctaacacttaaaggaaaaaaattaaaggattacaaagaattttaaatgaggtttcacttaaacacagagtgtcaagatttgtgggctgctacaagagatgctgtgtcactaggtatattagaaaagaaaaacaacagattaaaccatagttaggagggaagagaggcagagaaactgggccagtggtagaatgtgtatttggtgtgggcaaggcccattgtccacaaagaagaggagtataaaaaaaaactataggaataagtaaaaacccaaatggcttttgtaaggtagaccaaactggcaagcctccagccataaagagatcatgtctgtgtgtgtgtctgcatctgtctagctacctacctaccaaccagacatgaacttaacgaatgcatgtgcagctctaggtttgagttccattgaaaaagaaggaagggagggcaagtcagtatgtgtgtaaagcattagccagatggactcactggtggcctatcctaaacttttaaggaaggtatagtcctggtatcaaacttttcctgaatattgaagatgtgagaactctttcttgcttgttgtatgaagccaggattactctgaaaccaaaatcagacagataggaaaaaaaatcacagtccattctctctgccgagcatacatgtaaaaattcttaacgaaacgttagtaaatcaaattttaacagtagacagtgtgcccagaagagtttatttcaggagtggaaacaaaccatcacaatttatcatgtcaacacaccaaaaacgaaaaatcacaccattatctcaatagagagagaaaaaaaacatttgataacatcttaacgtttgttttcaataattctctttataagaaggatggttgaaaattttgttaattagataaaggacagtttttaataaaatcctacagctgacaactgaacggtaggaggcagagtgagtgccttgaccccagaccgcacaagtcaggagcacgctctcactgcctgccactgcttgtgtggagggtgggtgctgctggccagcgcagagaccccagagcagccagagaggaatgtgcaaagcagcgtgggaaaggctcctgagtgtccagaaactcagataacttcagcatgtgccagagtttgaaatatatacaagttatgactgcattcttactgtgaacaggctttaatagttgaagagagaacagaaggttgtgatatttgggaggggaagtgggtctcaagtgctcttcatgtctgactttccaacttttctccagcgtttactctgaagacagcagtgagatgtgtgcaccagcaaacctcaacttaaagctctggggcttatgcaaatataaacaaatactgcataataactttagggaagtactgcttttaggattctttgtgtttaaaatacagcgggttagtgataattaatggcatttgccttgcctttttatccctgcttgcttgcttctttcctcccccactctctctgtctgtctgtctgtctgtctgtctgtcttcttccacagctgtggtcctgtttaacactcctacttgccacccctccccacatcctgatgcttcctgtgtaccaggtactggccaggataacaaggaggtcctgtggcctgagaagcctatgtccatttttaaattctagcctgagctagccaagctgattcctcttaaggtcgtctcccaccagtatccccctcttccccacacacacctttttttggccatggctattttcttactctgctgacacttagctagagactctatttagttcttagatcactgcctcagtcaggctctccctgaccccttgataggcacagtttcagcactttctgttttcttttcctttaccatcacatctaatgtttctggtgtcatctccagattaaaccttgagcattacaggatgtcctttgatagcaataggggctggttccaggaccccccatagacaccagaatctttagatgtataaaagtcccttttaaacggaagcagagaatttgtatataacctttgcttattctcctgtatatttgaaaaaaatctgtatttcttataatatctaatgtggcataaatgctatgtaaacactcgttctgtattgtttagggataatggccaggttaaagatgaatatgctcactctagttaccattcagcccaggagttggatttattttattttggggacagagtctctggtattctcaatttgctatgtagccaaggatggccctgaattcctgatgttccttccactaacacatctagctcagcccaagtgttttagacttacagttggctgagcccatggacattgcaggccaactctgttggtattataggtgcagtcttctgagctgtgcagaggtgggcttcatagagtgtggcactgtggcatctgtctattccttacaataagtcagcctggactccgggtggcgcagtagcaacatatgtctgtagccaggcttagatgtggtccaatggggttgctaatactgtgccttaaacacaactgctgccgtccgtttcaggtaacacaggaagaagggcagcagttagcaaggcagctcaaggtcacatatatggaggcatcggcaaagatcaggatgaatgtagaccaagctttccacgaacttgtccgggttataaggtaagcagaacatgtgctacatgtgtgtgtttttaatagatgaccgtgcagcttgtgtagtgagaaagacggaattggaaggaggagtgattgaagtaggggctggtccacattgtgggttacatttcagttaaatacatggtgtattctaggcatttccaacccataaaaatctcatttgtctgaagttgaagaggaaagtacatgcaaggaatttgaaaatagtaaatgctttgacggtagtgatgacagccactaatcaagtccctgtcagatactgagtgacattcttttcaagttagtacgttggatccttacgacaacccagaaagctggatgctttctttactctccctttcaggtgagaaacggtacggacaactgaaataacttgttcagtctctatgtctgttaagctgtgggacttgaacccatccaaatctcaaattcctagttcctgccaaatccctgccaggctcagggcaagccaagcagcagagactccatcatgtcttgggtgtttgccccactaagacacagatgcaaacactcagtctataaagaggtgttttggtaggtggcctaggagttctcctcgtggacagtcagcggcttgaggtggcaggtaaggtctgctgtgcatgtagcccaggataagctgctcatgactagactgtggtttcctgtggcctcttccccccccccccccccttcccatctcctggctctccctgctagttagatagccttgatgggtatattgagtgggccctggttcattgtgtgtctccgtgagaggggaaggaagaggctgtaaggtttagtttttgatgagtttcagctctgcaggatggaaacgttcttgatgtagatggaccggcagtgacggtggttaagtagagaaccgtaacttaacagtgttgacctggggggctttgcttcccagccctcccccaccccatttccgtttcaatgattaacctatgaggcagtttctttgtgaaaataattactaccttaatcaaatacccatatttccctttgactctcaagaatcccagattctcacctgtcaatcagctaggtgtgaagattttatttttaaacaccacggaatcttaagccctcaggaccgttgtgaaggggtaggtttttattattcccatgtaaaaactaaagagtcagaaccaactaacttgtctagtattgatttttgttgtggttgttgtttaagtggcagagaagaggggtaattatgtgcatctgtaagaggtagttttccattgtccctgatgatgcatgcttattgctaagcatatctttcagtccaggaatttcaacttaggaagagactatagaggcattgattcaggcttgaccaggaaagcagtctgcacgtctcttcattcttgtgagggcctcacacatgctcggcagacccctgagcttcccctgctcctctgaggacttgtagcttcttttctttccaagggtttgctctcatcccctggtgtagcagttttcagccagtggggtgcatcctctttagggttcaaatgactctttcacagtggtcgtctaagaccatcagaaaacacagatatttatgtttatgactcatagcagtagcaaaataacagttatgaagtaattttatgtttggggccatcacgacatgaggaactgtgttaaatacgtacttctcaaccttcctaatgctgtgaccctttaatgcagttcctcatgttatggtgacccccaaccataacattatttttgttgctactttataagtgtaattttgctgctgttaggaattgtaatgtaaatctatgacatacaggatgtctgatatgtgacaacctccccccaagatgtcatgacccacctgttgagaaccattgtgtaaagggttgtagaactaggacggttaagaaccactgttctagtggaacactgagaagtgagtgcatttcagtgcagcctgtccagaagggacctgcatgtgttgggagattactagtggtgatgctattcggatttctctgtcttacaggaaatttcaagagcaagaatgccctccttcaccagaaccaacccggaaagaaaaagacaagaaaggctgccattgtgtcattttctaagagtcccttgaggtttagctaacaactgccagggaagccctcatctctgctaccgtttacatcatccggtacctttgtagccttagaccgatgatcaccgtgttagccttacaccaagaagctggcaaatcctttatgtgaagctaatgtaacggtcttacccagacttgtgtaaaggaaacactaaggctgcttcagacgttatctgattcctttaaaacacatgtctacacacacagatgcagtcttcaagggcttttaatagaggtaaaccaagtttggagcctgagctgtttgctaagctgaagtcataggttggaaagtaatttttaacttctggaatcatgttgcctactgttactctaaatagaaatatagggaaggtttttttttgttgttgtttttttaaatgtgaatttttgcctatctttaaaactttggttgtcaactttcattaaccttaaatacactgaatggaatcaacacaagtgagacatctcagacctttcctgatgctacggcttttgtttttccagtggccaaaataccaaaatgcctgttgtatttatggattaaaaactgctgattaagcctttgttatcatgcttccttcaagatgacaatattctctgtggccaaatgtttggactggttctgcacttgggtgttttggtgaactcgctatcttttcacagccgtggtaagggtaagagtggatggttcctgtctgtcttccttctcaagtattcctggttaagggattaaaaaagaaaacccacacaagctaaagctgtttttgtttgatgtaatataaaatatggaattgatctttccaaagtcagagatgattaatgtttttgctatatacttttatacgttattttcttatcaaactagttaacaagtatttttatatgtttgtaagcggatatgcttccaccttgtgtatatgtaaagatgagtatttaagtctcactgttcactgttaactgacaaagagaccatggcttttgcttgctggcttggtcctttttacatccactggtggccaataatcagaaaaccttcccaacagaacgcaacaggacgagagtgcgaagtcacgttcagtgtccccgctagatattgactgttatatcaagtattacgtgtaaaacctctacttgacaattagtgtaactgtggatggcttctgactttgtttttaactctgtggattgtgtttaagcaattcgaagtgcgctcctgattttgagactcagtggtattgcacagtggtcactttattgaatgtgtacaacagccccatgaagtttataaagtggacccttgtatagcttcaggtgctagaattaaagttgatctgttgtcaccagacgacgcttgacggctccttttttgtgccagggctttggtgagggaaatagacctggctggagtagcctgtgcctttcctgcaccgtgtctcagggagttctgcaggggatcttactgttccattgctttcttgaggtcagtgggttttaactttttttcctcaagtgttcttaacagagaagccccaggtgtagaggagagagggaggtgaatatattcacatagacccccagaggatgaatcctaaaatgtctttggcaaagagggccatgtatttatttaaatacaaacaaaatcacttaattttattgtgtttcaaaaatgtttacattattgtttttaagtttctggttaaattactgcctgggaagctagtggatttatctttggctctgatgcctctcaagaaccattgtatatccctgtgggaggggttcccgtttgtcacctgtgtctttagataccaggagctagccattaatatccaggttcctggggggtccctcagattttgtttctcctttttccactctgaacttcacactgtatattttcatggctgcattttcaacctctgtgagcttgcttctgcacttttttttgtctcctgttaatcctgtccagtgggttatttcagactgtgttttgttttctagggattttattttgtttttataagttctcgctaagtagcccaggttgatctgaaacttactgtgtgcttcaagcagaccttgaacccaagagattcctgtttgagtttgagtgttggggttgtaaggtgtgtctcccactcctgcctgtttttgatcctcccctccagtcccctcctcttccttcttttcccttccttctttcttcctcctctccatctcttgagttatggtcagttctggctggcctagatttcaccgtgtatacagcctggccttgagtttccagcagtcctcccatgtgctggaagcaccctcctccttcttgtgtgtgtatacatctccagtttcactcattaggtttatgcatgcctcttacccagcccttctcactctttcccagagagccctgaagctgggtcacaccttaacttctcccttggacatctagaatggcaaggtgtcttttgacctcacatctctgtagtttgtgtttgtttctgttgtgtggtttttatttagctatgatcctgactctgtatatatttaaattttgcttgggtgatagaaatttaatattttatgttgttgggtgtctggacataggtttttcatctgaaggtgcttggctttgtcctggtaaccagtctgtatatgtgctgttcagtttgatccagaactaaatgcattctgaagtagcttttcttctaggaatagattagtccactattgaacgtcctgggtgactgacgggtcagcactttccagcatggcttctgggatgcagacagtccccagcccttgagaagtaagcttgccacagctcatggttcatctcctcaccaaagtccagttgatccaaacatatacttagtatttggtaaagactctttatcctgtgcgtagtttgggatcccctctttcccgccaccctccccagtccttttgaaacattctagaatattttacagcaacttcaagctgcttcaaaggttccttgagctctggttccttgatttcagttcaaggaaacacttgtgtcctgcctgggatctcccaggccttcctctatagccaggaatattgctttaggctgaaagccagggcagctttaagactcagtctgtgttcactgtccacgaaccatatatttagtctctcttaccccttccttttttggggcaggacctggtcttatccaggctggccttgttcacctgggttcaagttatcctcctgcttcaacctcctgagtaactgctggggcattcggatcatgaatagtacccgcccaccatagttcagtttctgattggcacagcagggtctcatttctgtctctgcactgtgtgtttaaggatagctcgccccagagcttctgggccattctcctacctccacttctgttcccaccataggcgtgctgcggattccagatgtgcatcacataggctgcggattccagatgtgcattacataggctggggattccagatgtgcattactacagctggctttttatatgggttccagagattgacctctgaggttcagattagttcttcaggcttgtaaagctagagatttttacctgtggaaccatcttcctggtcccaagagcctgtattttaaggaaccctagaccttggaatggaaagaagctttgtggcgagtgaggggcagcagcaatcggcctcctgtaggtttgtttgattggggcattaggtaggagctgcagtgtggttggcagataaggaaatgaggcagtgagtgtggggtgggctgtttggggaagttctttggcacaaagctgggtgacagatgttttgctttaagaacagtgagagcaagtcggtgctcagtggtcagtccaagtaggtagcaatgcaaacctagaattagttgttaaattgggatgattggctagaagagagaagtctatagtttggctgtatagggtggagcaggcctggaattcatgcactaaggaggctggggcagaagaatcatgatatcacaagtgatatcagggccaccgtggtttacatagcagggccctggggtgggggtgggggtggggtgagggcagattctctatggctgagaatggttgttcagtgcttctccaagctgcttaagcccgttttaagacttcttagtccccagtgtgtggactgacatatttttgctaagtgcaaggaaaagaaaatgaactaggaacgtaattattctattggctatcactgcagcgtcaagttactataaaggtctctctgtggatatgactgaagggcaggtcctgcttcaggcagaccgggcgtcccgcacaatcagcaggaagtcaagtgtttcctggtgagccttctggcgacggagctagactggttattccgggttaggatcactcatgaggatgtgtaggtcagaggacagcttgcttctgtgcattggtcctctcctgccgtatgggtcctggggaccggagtcaggtcgtcaggcttggcagcgagtgccctttacccacagagccatctcaccagcccccactcttctcttaatacttacaaattactcttggtaaaggaaaattgtctaagcatgaaatgacttaaaacatgagcctgttactaatcagtatgccggagcgggggtattttgagctccgtgagatgttaatgaatgccatcttatgtgaagacactatgcatgttaagtgaaaacagcccgagatagcattgcgctctgatgataactgttaaaaattatgtatgcaaattttatttgtcgagacattttcagttacagatgaccaaaatgcagctctcgtcagattcagtacaaaggtgtgcactacaaagcagtgaggggcaggtggagtagagctggctgctgggagacccactctctgcgtgagaacttggtaaactgcgaaggcgagggggaaggctcggaggtcagtcctgacaccagaacagcaggacccacctgggccggctgtcacagctgctcaggtgccaacccagattccctgggccccaccattactgtccttgcccttctgtccctggatacatgcattggatacatacatcgcctctgagcccatgggggttcgaaagcaggcaccgtcatttaaatgtgacattttaatatggatgttttgctttcatttttccacaggatctaaatcggagaattagccccgtgctaattaacatgtagctgctatttataattcgttactgcatttcaatcatttttcaaagggaatttatgttcattctgtctactttgggcaatatgaacaagaagaatggggatattgaaatcgaccttgccaagtagcaacatggtggaaatggctggcttccttgattcggagttttaagtaggaattaaacatttatggtttagtcttgtttggataatagtatgcatttttttagggtataaatattttacttcttcatagataattccatgtaacagaattttctaaagccaggctttgaaaacttcaggtcagactgtcaaaaatgtagctcttagagttttctgacttcaacaacctttgctggcttgggacagtttctctagtgctgagaatatagcttccaccatgcgtgatccaaaattttgtttttaacttgttattgtctaaaacatggaggcttaatgaaaacagagcacagcggtaatttgacagagagaatgtttatgtattgatacaatagacgggttgtgatgggtttccagagtgcagaaggcatccaagaaagtgtgcccgttctgctgcttgcaggcagaccttgcaaagaaagcacagcacagggtcttttaaccttttcacttcagggggggaaggaggccaggttttagtctcagtagcttcagtagattgccctctgataaaacacattggcatggtgataggaaattgactcaatatctgattgggaaacatcttacaatgtgggtttgaccagattacagctggtttggggttggtgtaaaatatatatacaattaaaattttctttgattgagtgcacactgccacgcctggctctagttttctttacgtggcaagttgttactcgccagggtggaagtccagtcagacttcactcatagtaagaaaaatctttatttccaaaatgattggttagccagaaaagtgacaaccacctaactcaaggcttttggcaggaaagatttgacattcacaatctccccattacaaacggagcaatgtagttcatgacgaaagcatgtttcttgttctctttagtcagttttctggtttttaaaaaagtctccaaaaccagggttaaaattatacccaagtgggactgggtgaaaacccaagctgctagcgaagcctgccaccatctgaaggagcttagattgtcatggtttgaggataagttgacaagaccactaggaggatgttgcaaagtaggcgggacagatcctttagcagagcatttatggggagggtggaaatccaagcctctcatttctttgttttgtactcctttgaaggagaaagcaattcattaatctaaaaatagcattggaaataatccaggtggctgagggatgtgatggcagcggtccacctagaagggacagaagcgccatcttttcctgcaaatgaactaggtagcaactggaaaaagacccaactctcccaccacttaataatcctaaaaacaaagacagacccagcgagattttcttttcttttctttttcttttttttaattgaacaggctctcgtgtgttaaggaaaatacatattcaggggttgtacatagatgtggctggacatattctgatatgttgaatggagattcttaaagtactgtattcatagcactgtgtgcatcttgcccacagtatgtatttggacgaagcggtaataaacagacttgcaaaaggatgtggtggtagctttaacagatgcatgagtaaaacctgctaatgagctcacagctgagatcaacatcctcttactcttgactattggttggttcttagactcctgggtttagtgtgctgctgatagcttggaaatcagtggaaacccccgactttcctctggactatccatgaaaaccagggccctggtccagaaatcaggcacaggcatgactgaataacccttacttgtaggtttgtatcttagtcatgggaatagtttgtctctctctctctcctctaactataaaatatcacgactttaaaaaaaaacttttaagtagggaagatggtatttttgttgaggattgacttggtggctctctggccgacttatcaggtagttctcagagctaaaatgttttattctaaggaagattggggaacctaaaaggtttgcatatgtgtaggaagattttagggtggctttggaaccagtgcccagtagaccgtctgcattggctcagagaaggatctgccgagaaaaggttagtgcgtccgtccggcaccctcggacagttatggcaccaacaatcagaactcaacggaaatcatggctcacaaataaagtagccatcatcacctgctacccttgtggtgtcaacaaagcagtatcaggaggtttgtaacaaacgccacccctaccttagagctcctccttcagggcactgaagaacccatgaccctggagacttaccaagatacctggagttgtgctaaataaaaaaagagatgggtgaacaggtttctgtaagagtgagcaggccgcagatgagagaggagaatctgtcctctgcatttgatggctgtgtctcctgcatgctgcattctggcacccgagaacatggttgcttctccttgtggatgtggccagggtcttcaccctgcttgaccagggggatgttccagagggacacaaggtgagccaacactactcactcagtgtaggaagagggccacctgaggacaaggatgccccacttggcctgcactcaccaagaagaattcggacaggctgtcccttggcatcataagactattgggcaaaccacatcgtaataaaaaaaaaaaaagaaagaaaactagtggacacaattgaaatcatcttacacaagcaaacaaaccacccaaccattggtgactagaatctggaatgcggccgtggggagttgaacccccattaacaagggtgcacgttgcacgctctgatctccttcttgtctttgcagctggtaaactgggagcttttgaacctcttcttcacagtcatgtagcgctcttggatcccacctccgcacagtttggtgcattctgaccaggctgtccacgggcgcattcgacagcctgaaagtaagagagcgcctggttaggccagcagaatatgagagcagcgacttccagcaggactatccaatgcgttgtcttgcccttcaccgctcctctgtgtaaggagtggttgaattcattaatgcctgctgtcctcattaggggctgttagctcatatgtgatggtttgcaaaagctgtggctgttagtgcactggatctttgcctgtcgaagggcagggtctgtttccccactcctttgaagctgggcttggtttggcaaatgggatgtgagcagacaccatacctgagaagccactgctaggtgtgagggcaagactgggtgacctcactgcagagacctcgcggaaagaggccccaggaaagcaggtgaggctggggtgctgcgccacccctacttgattgtggctgcacaaatgagacttgagtccaacacagctacacctcagaagagggaatccaagccagcttgcctctgagcagcaggctcacgctaatacaggtttgtttaaagcactgacttgtaagcagggaccagccatagggcactgagctatggctcattagcctccctgcctgagtttttagcccacccaatagtaagtaaaatgagcaattctttccctatgaaacatggacatgccttcctcaaaagaacctcttctgactgcacagatgaagcctcctgtttgcacttgtcatcgcttcccatatatctctcctttgaacacagatgctcgtgactattattagatacctgtttaccacaccgcagcagagtttcctggagaaactgctgagcacatagcctttaactggtatggactgatgcctgcctgccatactccctaaggaaaggatctgtcaacttagtccatctctatgccagagaatgagctgtctttttgtttgttttgttttccttatacaggtttgtgtgtgtgtgtgtgtctgtgtgtgtgtccttggctgtcctagaactagctctgtagaccaggctggcctctgcctcctgagtgcttggggttaaaggcatgccagccagatggactgtttttctttccttttccttttctcttctcttcttttttttttttcttctttttaagatttatttattttatgtatgtgaatacactgtagctatcttcagacacaccagaagacagcattggatcccattacagatggttgttagccaccatgtggttgctgggacttgaactcaggatgagcagccagctcttaaccactgagccatttccccagccctcaaatggactatcttaagagactttcatttttatatggctgcccttttttgcaccctgggaatcccaagaacacttaatggtgcgtaagcattggatgatcttatcttaactcattctgttggcctgccaatcactgcaccagctcgttccccagtgccattccatgtaaggattattattttaaaaatttctttgtcgtgggtgtgggtgtggatgtgtggtgttttgcctgtcaaggccagagggcatcaaatcccctaggacttgagttacagaatgttgtgagccaccatgtgcatgctgggtgttctacctgggtcctttgaaatcatctctctagcccacagatggtgatttttttaaagttatgttttcctgtttgtttgttgtgaattgacatgtatgtctgcatgagggtgtcagatcttggagttacagacaggagtgagctaccacgtgggtgccgggaattgaacccgggtcctctggaagagcagcaagtgcttttaaccactgagccatctctccagttccgggatgatggttttaaagattggttttatatctcttatttatttgtgcatgagtgcctgttaacagtatgtgtttgtgttggtcagagagccatttttcggagctggttctcttccagcatgtggcttccagagcctgaactccggagtgtttaggcttcatctactgagacatctgcctggcttttttttggaggggtgggtcctataacttttcatgttattctggagaagggggacacataattgtcccccagatataaacaaaaccagcttctgtctttgtcttctctaaattacctaatttgggtctgttaagccactctcaaaagcacagactcagacccaactcctctaccattggccgctgactcttacacccgattctctccttgtatccttccatatctgcacccctcctgttacttagtgcatcctgtggtgtctctgcctcagcagctgtgattcctggcgagcgcctaacagctccctaagacacagtctggctttctctactctggcatctcctggaaccccagtttgtactgtgtccattctctgggaaccccagttcgtactgtgcccattttctggcatctcctggaaccccagttggcactatgcccattctctggcttcctttgctcttggttcattattattctgttggagtgctaactgcttatgtggcaacctgagtccatattaatttgaaggaataaaaatctaaatgctaagctttgtggttaacattaaaccaggaagccaccaggtcagagtggtcttgtctcagccctccctttaacgggatgatttaatctgaggcttaatgaaaatttccctaccaaccaggctcctctcaacacatctgtgcattgaaatacaatgcatttcccttttctgtaaaagcaaatggggttggttagtcacagctgattgtgagcaaggtgttttgcaaattagaagaaagaactgtacaatttctagaggctttttgcttgaaaacggattttgacagccaattatcatatccaatatttttttgctacaaacattaacccaatttcttccatataagttatgctttcttagtatttaggaattaaaacttcggctgaataattcaagtgcctctctcttcagcccagagctgtcccatgtcctggaggccagcacacgcccccaggggaacagtacctgggaac

SEQ ID NO: 466 - DNA, 2264 bp, Mus musculus
agacggccatttgtagcggtgccgaaggctgcgttcggctgcgctgcagatccgcgaagaagagcgcgctccctggccgctgcgtcctctgccctggagccttcccggctctccagcgtctcgggcaactcccagccggtccgagggatagcgctccgcggccctccaggccactcacggaccccgcgcgctctaccgcctgtaacccagccggccgcactcgtccccggagccgggcctagggcgcgcggcggccgggctgggctcggggcgtcccgatggccgcggccggctggcgcgacggctccggccaggagaagtaccggctcgtggtggtcggcggtggcggcgtgggcaagtcggcgctcaccatccagttcatccagtcctattttgtgacggactatgatccaaccattgaagactcatacacaaagcaatgtgtgatcgatgaccgagctgcccggctggacattttggatacagccggacaagaggagtttggagccatgagagaacaatacatgaggacaggcgagggcttcctgttggtcttctcagtcacggatagaggcagttttgaagaaatctataagtttcaaagacagattctcagagtaaaggaccgtgatgagtttcccatgattttaattggcaataaagctgacctggaccatcagagacaggtaacacaggaagaagggcagcagttagcaaggcagctcaaggtcacatatatggaggcatcggcaaagatcaggatgaatgtagaccaagctttccacgaacttgtccgggttataaggaaatttcaagagcaagaatgccctccttcaccagaaccaacccggaaagaaaaagacaagaaaggctgccattgtgtcattttctaagagtcccttgaggtttagctaacaactgccagggaagccctcatctctgctaccgtttacatcatccggtacctttgtagccttagaccgatgatcaccgtgttagccttacaccaagaagctggcaaatcctttatgtgaagctaatgtaacggtcttacccagacttgtgtaaaggaaacactaaggctgcttcagacgttatctgattcctttaaaacacatgtctacacacacagatgcagtcttcaagggcttttaatagaggtaaaccaagtttggagcctgagctgtttgctaagctgaagtcataggttggaaagtaatttttaacttctggaatcatgttgcctactgttactctaaatagaaatatagggaaggtttttttttgttgttgtttttttaaatgtgaatttttgcctatctttaaaactttggttgtcaactttcattaaccttaaatacactgaatggaatcaacacaagtgagacatctcagacctttcctgatgctacggcttttgtttttccagtggccaaaataccaaaatgcctgttgtatttatggattaaaaactgctgattaagcctttgttatcatgcttccttcaagatgacaatattctctgtggccaaatgtttggactggttctgcacttgggtgttttggtgaactcgctatcttttcacagccgtggtaagggtaagagtggatggttcctgtctgtcttccttctcaagtattcctggttaagggattaaaaaagaaaacccacacaagctaaagctgtttttgtttgatgtaatataaaatatggaattgatctttccaaagtcagagatgattaatgtttttgctatatacttttatacgttattttcttatcaaactagttaacaagtatttttatatgtttgtaagcggatatgcttccaccttgtgtatatgtaaagatgagtatttaagtctcactgttcactgttaactgacaaagagaccatggcttttgcttgctggcttggtcctttttacatccactggtggccaataatcagaaaaccttcccaacagaacgcaacaggacgagagtgcgaagtcacgttcagtgtccccgctagatattgactgttatatcaagtattacgtgtaaaacctctacttgacaattagtgtaactgtggatggcttctgactttgtttttaactctgtggattgtgtttaagcaattcgaagtgcgctcctgattttgagactcagtggtattgcacagtggtcactttattgaatgtgtacaacagccccatgaagtttataaagtggacccttgtatagcttcaggtgctagaattaaagttgatctgttgtc

SEQ ID NO: 467 - protein, 214 aa, Mus musculus
GARRPGWRVPMAAAGWRDGSGQEKYRLVVVGGGGVGKSALTIQFIQSYFVTDYDPTIEDSYTKQCVIDDRAARLDILDTAGQEEFGAMREQYMRTGEGFLLVFSVTDRGSFEEIYKFQRQILRVKDRDEFPMILIGNKADLDHQRQVTQEEGQQLARQLKVTYMEASAKIRMNVDQAFHELVRVIRKFQEQECPPSPEPTRKEKDKKGCHCVIF

SEQ ID NO: 468 - DNA, 101193 bp, Homo sapiens
  misc_feature (1)...(101193): n = A,T,C or G
gtctccctctgttgcccaggctgcaacgtagtggcgcaatcttggctcactgcaacttctgcctcccaggttcaagcgattctcctgccttagcctcctgagtagctgggattacaggcgcccgccaccacgcccagctaattgttgtagttttagtaaagacggggtttcactatgttggctaggctggtctcgaactcctgacctcaagtgatccacccgcctcggcctcccaaattgctgggattacaggcgtgagccactgcgccccgcccttcatgaatctttaaaacaacaattgtcatggtcctggtgagaagtgtggattaaagaaagacctgtttggagctccaaaaattgggcctgggtgctacagagagctcgattttcagggcttagtcccctcagagcagtaggtatgcctctctttggaaagctgctgtagagaagaaagagaaaaagtcgccatcacaattcccctgagtgacagaaggctacataaatgtttttttgtatattaacactcattctcagttttcctagaatagttaattctcctcgatgatttaactcccatacctttttacataaatagatcatatgtgtataatctggctcccactttgtccatatcattaacaaatatttgcaaataaaattttatatttttcgcattaaaaagaaatagtgggccaggcatggtggctcatgactataatcccagtactttagtgggccaaggcgggaggatcacttgaggagtttgagcagcctgggcaacatagcaagacatcgtctctacaaaaaaatttaaaaattagccagatatggtgtcacatgcctgcagttccagctatttgggaggctggggtgggaggatggcttaaacccaggagttcaatgcagtgagccatgattacgccactacactccagcctgggcaacagagtgagactctgttaaaaagagaaagaaagagacagagagagaaagagagatgagattgcatttcattaaaattaaaaagatgcacatccaagaacattatcaagagagtaaaaagacaagccataggatgggagaatatgtttgcaaatcacatatctgataaaggtttaatatctagaatatataaataactcctacaactcaacaacaaaaagacaatctgattaaaaactaggcaaaggacttgaatagacatttttccaaagaagacatgcaaatggcaaataaacctgtgaaaagatgttccacatcattagtcattagggaactgcaagccaaaactacagtgatatatcatttcaaacctactaggatggctataataaaaaaatgaaaaataacaagtgttgacaaggatgtgaagaaattaaaaccttcatacgttgctagtgggaatgtaaaatgatgcagctgctgtggaaaacagtgtgtcagttcctcaaaaaattaaacgtagaattaccatatgatttagcaattccatgattaggcatatccttgacaacaagaattcaaacaggtacttgtacacaaatgttcatagcggcatttattcttaagagccaaaaagtagaaacaacccaaatgttcttcaataggtgaatgaataaatagtgttatatccatacaaaggaatattatccagccataacaaggaatgaagtatgaatatgtgctacaacatggataaactttgaaacactatgctaaacaaaataaaccagacaccaaaagacaaatattgtatgattctagttatatgtaatgtctagaataggaaaactcatagagagaaagtaaattagagctttccaggggctggaggtggaagagaatggggaattactttaaaaaaagatagagaatacaaaaggtagaaaataaaactcatctgtgatttcactctctaggataactgagtatcctgccagtcttcatctttttaaaaaaaatctatgcatagtgactaagtacaagcttggacttcctgggttcaaggaagtgcactttgggttcaaggaaatgcactctgtcatttagtagctataggacatgtctgtgctgcagcttttttgtataatacaaaaaataatagaacccactcagatggttgatggattaaactggataatgttttgtttttttttttttgagatggagttttgctctgtcacccaggctggagtgcagtggcacaatcttggcttactgcaagctccgcctcccgggttcacaccattctcctgcctcagcctcccgagtagctgggactacaggtgcctgcgaccacacctggctaattttttgtgtttttagtagagacggggtttcaccatgttagccaggatggtctcgatctcctgaccttgtaatccacctgccttggcctcccaaaatgctggtattacaggtgtgagccaccatgcccagcctttaaactggataatgttttgaatggtaagcacagtgccgggttcctggtaagtgctcaataaatgacagcttatgtattaatatatatcggtatctatctatcttggtaattgtaattacactggatatactgctttttctttttttttttttttttctttttttgagacagagtttcactcttgttgcccaggctggagtgcaatggtgcgatctcggctcactgcaacctccaacccccaagttcaagggattctcctgcctcagcctcccaagtagctgggattataggcatgcgccaccacaccctgctaattttgtatttttagtagagatggggtttctccatgttggccaggctggtcttgaactcccgacctcaggtgatctgcccgcctcggcctcccaaagtgctggaattacaggcatgagacaccatgcccggcccaaaatatcttatttctagtaactggccagtggataaaaataaatatgtcttagactgagtaatggataagcaacataaatgtatttctcacagttctggaggctgggaagtccagatcaaaatgctagcagatttcacgtctggtgagggctctctgctttacagatggtgccttttatgggtccccatgtggcagaagaggcaaacagtcttcctcaagcctcttttataagggcattgtgatggttaatactgactgtcagcttgattggattgaaggatacaaagtattgatcctgggtgtgtctgtgagggtgttgccaaaggagattaacattctgagtcagtgggctgggaaaggcacacccacccttaaactagatgggcacaatcgaatcagctgccagggaggctagaatataagcaggcagaaaaatgtgaaaagaaagactggcctagcctcccagcctacatctttctctcttgctggatggttcctgcccttgaacattggactcccaagttcttcaattttggaactcggactggctctccttgctcctcagcctgcaggtggcctattgtgggaccttgtgatcgtgtgagttaatagttaataaactctcctttatgtatttctatttcattaattatagattaataaatatctatatatctatttcattaattctgtccctctagagaagcttgagtaatagaggcactaatcccattcatgggggcagagccctaataacctcctaaaggccccaccttttaatgttattacatttagtattgagttttaacatatgaattttggtaggggggattagaccatagcacttatccttctcattttcccatataagtaaaaattatttttaatggccacatagtggccattgcatcattgatttaaccaagtccccgttgttgaatatttagggatttttcaatttttcattatttaaaaaattctatggtaagaccaggtgtggtggctcacacctgtaataccagcagtttgggaggtcaaggcgggtggataacctgaggtcaggagtttgagactagcctggccaacatggcaaaaccctgtctctactaaaaatacaaaaattagctgggcatggtgtggtgcacctgtagtcccagctgctctggaggctgaggcacgagaattgcttcaacccaggaggcagaagttgcagtgagccaagatcacgccactgcaccccagcctgggtgacagagtgagactctgtctcaaaaaaataaaaaaaaaatgcaatggtggatacctccgtttgattctttctggtagccatgcagaagaagagaggtatgatttttggccctgctcagccttctgggctcttgggttcctaagacagtgtgctacattgagatggatctcaaggtgggagacagaaatccgagttccagtcatgcttctgctctatttccaggtgatgctggggattgctcttctctctgtgggcctttgtttccccatctgtgaaaggagagctttagagggaatgaactcaagatggcttttctgttctaaggctcaatgattctcagatcatcctctactaagctgcggatttctccagcaccattacggccttcctcagggttgtgtgtgtgtgcacacgcttgagcgtgtgtttcaatttctattcttagcaatgtgatctttaaacaaggaatagatttgtgcttatgtctcatctcagatgcatgcagctcctgctgggcggtttcattctctgccagccattcattcacattaaaagcaatggcccattaaggaaataagtggatgatgctcctccatcacccatggtaagtattgcaggctctgatctgggggcttggccttctttggccaacaggtcttggctctgtctgttgtagctacagatgaggttagaggaatcttgattctagcatctccctctccactctaccctcagatcctgtctctgggatgggccagggatgctgtttggtcaatattggtttgtaaagattatgaataaccaacagtccagatgagatggtcattgtttgtcctgaaataaagagtggacagggatgagcaccctcctctaagagttcttgctgtggtggtgtctcagggtcactttattttattttatttttagacagagtttcgctcttgttgcccaggctggagtgcaatggtgtgatttcggctcactgcaacctccgcctcccgggttcaagcgattctactgccttagcctcccgagtagctgggattacaggcatgtgccaccatgcccagctaattttgtatttttagtagagatggggtttctccatgttggtcaggctggtctcaaactcccaaccgcaggtgatccacctgcctcggcctcccaaagttctgggattacaggcatgagccaccatgcctggcctattttattttattttttgagacggagtcctgctctgttgcccagactggagtgcagtggcacgatctctgctcactgcaacctccgcctccccggttcgagtgattctcctgcctcagcctcccaggtagctaggattacaggcacacaccaccatgcccagctaatttttttgtacttttagtagagacagggtttcgccatgttggccaggctggtcttgaactcctgacctcaggtgatccacctgcctcggcctcccaaagtgctgggattacaagcgtgagccactgcgcccggccatcactttagatatttaatatacaaattcagattctaagtccgtgtcctcagaggttctcatttagcaggtctggggaggagcccagtttcttcattttaaaagacactacaggctgccttttatgtttgaataggaaaaaaataaataaataaaatacactacaggggatttggaagcacatccttcgtggagaacattgtcatagtaggatttgcaagctcttaaagcccactaaagccaggcaggtaacaaatgggtggtgtgtgatagaagagtgctggtgaccctgatgaacaggaggatcttaagttttctaaaacgcagtcagtatttagctttagctagttgttgccagataacgccagtccagtgttgctagatattccacttaatttttccaagaagagttagaaatactgatttatttgtgacataccctatttttaaatatcggcaaccaattcaaaatttacacaaaaaatttgaattgtaggccaaaacatatgcgctggctagatctggctctgaatctgcctgttgaaatctcttgacaacactttagccaaacaaaagcttgatttaagtcaaaatgatgcagtcaacagctctcttgactggcagcatcacactgcttctgcgatgtgaggctctccggggttctggataacacccagcttggcatggagcaaagtgctctgagcaggggagtcaggagacctgtttcctaatccctgctaacaacttgctaggtgacattgggaaagaaattctctcccttgtcacaggatttctttctataaagtaagggggatgatctctattgttctttccaaggttctagatcattctttttcatgaaaatgtatgtacttattatctgtcagctacttgaaaaggaaacttttcagattaagttgaaaattcacctttaattggcttgagtgacaactagttcttcctctcccatattctcctgtgtcttcagtgatttgtgtttgcatggaagtttctttctgctgtatgcttttgggggtattttctaagggaaagagctcattttggcatagaaagtctgggcggggttgagcatatggacttctcatttgctgaatactacgtttgagtcaaataaaaaaaataaaggaatagagttaatatagggaacattctgaagtataaagccacttccttgaacttcacagttcaaatgaaaccttgcaattgaatcttttttccttgtagcttcactgagacataatacagacacaataaaattcacccatataaagcatacaatccaatgtttttagtatatttacagagttgtgcaatcaacaccactatctaatttcaaaacattttcaactcctcaaaaagaaactcaatacctactattggttgctgtaatcctgcaaccacaaatctgcttcctgtatctatagatttgcctattctggaccttttatataaatggaattatataatatgtggtcttttgtgtctgtcttctttcatttagcataatgttttcaaggtttatccatgctgtagcatgtatcaggacttcattcctttttattgccaaataatattctattgcgtggctatacgacatttttttgtttatccactcatcagctgagggacaactgagttgtttccactttttggctattatatataacattcacaaacaagttttcatgtgaatatatgtcttcatttctctcaggtacagataagtaggggtgtaattgtcaggttgttggtaactctacatttaatcttttgaggaactgacacatacagttttccaaagcagtggcatcatttaacacacctaccagcagtgtatgagggctccagtttcttcacatctttgtcaacacttacctgtctttttaattttagtcatcctcgtgtgtgtgaagcagtatttcgatgtacttttttttgagacagggtctcgctctgttgcccaggctggagtgcggtggccccgagctcggctcactgaaacctccgcctcccaggttccagcgatcctcctgccttggcctcccaaagtgcagggaatacagacatgagccacaacaattttgttttgcttatgattttgtgggtcaagtattcaataagggtcgggagtgatggctcatgcctgtaatcccagtacattttttttttttgagacggctctgtcgcccaggcgggagtgcagtggtgtgatctcgtgatctcacgatcttggctcactgtaacttccgcttccagcgttcaagcaattctcccacctcagcctccggagtggctgggactataggcgtgtaccacgcccagctaatttttgtaattttttgtagagacgggttttggcatgttggccaggctggtctggaactcctgggctcaagcgagcaatccgcctccctcggcctcccgaagtgttgggattacaggcgtgagccactacaattttattttgctcatgattttgtgggtcaaatattcaagaagggccgggagtgatggttcatgcctgtaatcccagcactttttttttttttttttgagcccgcattgtcgcccaggcgtgggtgcagtggcgtgaacttggctcactgtcacttccgcgtcccaggctcaagtgatcctcccacctcagcctccggagtagcggagagtacaagtgcacgccaccactccggactaatttttgtatttttagtagagatgcgtttagccatgttggccaggttggtctggaactcctgggctcaagcgatccgcccgccttggccttccaaagtgctgggattacaggcatgagccattgcgcccagccatcccagcactttgggagttcgagactagcctgggtaacatagagagaccttgtctcttaaaaaaaaaaaattacctgatcttgatggcatgtgcctgtagtcccagctgctagggaggctgaggtggaaggatcacttgagtccagaagttggaggttgcagtgggccatgattgtgccactacacttcagcctgggtgacagagggatcttgtctcaaaaaagaaaaaaaaaagatttttaaaaaaggaattcaggatgggctggcctggatgggtatttttgcttggggtctctcacgcagttgcattcagatgctaacaggggatgccgtcattggaaggctcgattaggctgagtgtccaagatgtctcacttagatggctggcaggtgatgctggtgatctggtgggagctcagtgggactttttttttttttttttaaatggcatgttgctcctggccatcaatcagacttcgactggcatgcctacatgtagcctctttagcatggcagtcttatgatagtcaaacttctgactttgttcctcccggagtgagaataccaagagaacagctgcatggcctcttctgatctagcctgggaaattaggcagcatctcttctgctgcattctactggttccaaatgagttaccaagtgaagtccaagaacttgcagtcatgttccaagattgctgtaaatgcttcctgtgtagcagcactgttttatgtgctcatttaattcttattaaaaaccccatgaggccgggtgcagtgactcacacctgtaattccagcactttgggaggccgaggcgggaggattgcttgaggccaggagttcaacccctcgcactcacactcctcatatccaattactgcacatttgtcacacataaacatagccactatgacactgtactgacacatacaaaatctgtcacattccgtcttgcccatgcaagctcaatcactgacttattctccatgctcagccactgtcccattcttcacactgtcacaaccaccagcccatcacacactcaattactgtgacacagctctaatcctcaatcactgtcacatactgtttttcacacaaatatggtcaccatctgtactcttaaagcagggtatgtactctcctataaaattgagttaatatgccaacagccctatttttcgtacacgccgtcacatattgtatttttcatccacacaatcccttacatagacaattagggtgacacactctttctgccttcgtcccactcccaactgacacccactcccacactctcacgcactcgctcactggctagggattagagcggtgtgtccgtgggggtctgaagtccgggttacctcccgaacctcagccccaagcggcgcggccccgcccctccccgccccctcatgcatatgcagcacctcagcctggcagcccggcccccagacggccatttgtggcggcgctggaggctgcgttcggcaggcgctgcggagacgcgtagaggagcgcgccccccggccgctgccgcccctggcccgtgccgtcaccccgcttctccgcgcctcgggcggtacccagccagtccccagcgccgcgctaccgcgctgaccggccctccagacgcctcccggtacccgggaccccagcccggccgctcgcccgcagcccgccggccgcacacgtccccggagccgggcctagggcgggcggcagcggcggctcggcgcagtcaggctgggctctgtagcgtccccatggccgcggccggctggcgggacggctccggccaggagaagtaccggctcgtggtggtcggcgggggcggcgtgggcaagtcggcgctcaccatccagttcatccaggtacctggagcgggcctgcccggggcgccggagcggcggcgggcgggggctggcgctacctgtggcggggcggccgccgcgacctcgccccagaggcgcctcgcgggcccgggccggggccagggggcgggagggcgcggggccgactacgctcctgccctgcggccgcagcgtcgcgctcctgcctcctcccgggcgcggcgtcgcgggagtagggcttctcaggaatgtggtcgggagggcggagctggaagggtgggaagcaccgatccaccttattgctctggccgaggccagagacctccgggagaggctgggccaccgagccgggctttactgctccgagggtccgggcgtggggctggagctggagccccgcgcgctgcttttccagccgcctgcggccgcgccttcaccgtcggggcgatagcggtggcaacttggccgcggctccgcgtggtctccgggcttccccgcgccgcctgagccggagctgcccgcttcaagtactgtgtatttctttgtgtgtgtgttacgctctttttataagtactctcttaggtaatatgtccgggtgggagtgtgtgataatgccccggggaaatggtggcttctaggaagttaaaaatgttctctgatggggtgagaccatttcctaggaattcctgatgccgtcctgcttctcgccgtgcctaggtgaagtttgggatgggccgggctaggatatgaccgagtcgtgcgttctgttttctaaccaccctctcccctacccccagccctctctggttgctagagacggtaagtcaggggtttgtggtaaagaaaagggaggtggtattcttccttcttagaatttgctcttggggagaggtttgagtagtcttttttgggatttttaaaacacaaagccccgatgtctttctgcttttgtcaacctaaaaggtgtggcatatgctgggagagaacgaaggtaccctgttataacaggaaacaaggatatttttcacagtatctagagtatgaacggtgaaatatttttgtctggtttccttttcacccatttgtcattaattgggatacctgaatagcttatttcacttagtgtttatagtgacattaaaatattgagtactgtaacaaatgtgattgtcacctttcacattgagtaaatgagcaataattgctgctataatattccctggattactgctgctaaaacctttgaatccaggaagaaaggatgttttatgtaatgagcatttacagtatgcttattagtgggttaaaaaaatcactgagtaaggggtgagattggtttaagtttagcaggctacagaatcagggatgctgtcaggttgctatttccctagggcgcagagagattgtacgtatctaatggcaaagcaaaacaatttatagctaaccctttggggactagtctgatggctgagggagggtgggggtgaggggataagtggaggagaagtctaggagtgggagaataatcttgggttacaatattggtagtgttatttaaaagatttgaaccacaaatatttacgtttttttgaggaaggggccatctgaattatttgagcccatgttaattaattaaggtgttgggcctttttgttttggggaagtaatggtattaaaccattaagaaagcggtaattgggcctggcgtcgtggctcacacctgtaatcccagcactttgggaggccgaggcgggtgaatcacgaggtcaggagttccagaccagcctggccaatatagtgaaaccccgtctctactaaaaatacaaaaattagccgggcatggtggcgcgcgcctgtagtcccagctactctggaggctgaggcagtagaatcgcttgaacccgggaggcggagattgtagtgagccgagattgtgcctgggcaacagagcgagactctgcctcaaaaaaaaaaaaaaaaaagcattaattgccgttttcctaataatttatagaatcatttgttgaagaaatacctccactgtgaatagtatagtacctggatgctctagatgatattaaagaagtaaaggaagcaggtatgtatgaggaagacatatgtgtacataaagagtatgaaccttgagtcttacagacttgagcatgtgtgtcttttaaagctctgtcatttatcggctgtgagaacatggccaaaatactcagcctctctgagcctcagttttctcgccagtaaaatgggtctgattacacattctttataacttttatgacaaagatggtagcattgtatccagcatgttgtatgtgctcagtaatggtaggtgttatcagtgtttatgcctacagttctgtaacatgtttaaatgcaaagggaattcagactcagagaagtctgtggaaaaaattgatgaaagcattatgtaggcttggtggtggggagaatggaaatgtcatatgtgggagtcatatgctagtttggagagaggaggtggcaagtggggaagtgggattgatagttgatttgggacctgtgatctggtctctgcaaaaaggagcctttttggagagacaggaacccgaccacctggatgcagtctcagctctaccacttgctgcatgtgtaattttaggcaggttacttaacttctctgtaccttagttttccccatctgtaaactggggaaatatggtggaccacatatagctgtgaaattaaatgagttaacatgtcaagggcttagaacagtgtctagtacagtctgtagtaaagctgcatacatttttatattaattttagattatggagctaaagcgatttttttatatttacacttaatagggtagctattcattgcctgactcctggaatgttaaaattcattccaccatgattgtttagcagtagtaactggagggagagaacacagcagactaatcattttaataagcagaagtcagttctcttggtaggagattagaatggcacaaattggacttacttttttaagactcctgaaacaccagactgtttttacaattttcagtatatatattttctactatgtgattttgagcagaaaaaaatataaaattgggaacggagaatttaaaaacaatgccttttaccctaactttctttgacttagatttagttgttaccttctgttcatatgaagagttgcaaaattagggaactaagataattaaattgagataccttttcctttttaaaaataaatataacaaatcataaagtagccatgataaaatgtaaagtattatgttatttaatgaatatgtgtgtgtacattacctcctcctttctgttgctcatatttctttgaaaaatgtgtaaagttctgttggtaggtagaacacctaaatgttaagtaaactctaggtaggaaatgacttcaggatggtacagagtggttaggagagactgctgggtgtgtggggtctatgtctctctacccaggtgactttgagtagtttcttaatctgcctttatctcgactgagcttctctttcttccccatgaaatgttgggtttggttgaacaaatttctgcacttttgaaattctaggagtgtttttttttttttattcatttaactagctgtgtgtttagtcaagtttcttaggttctctaaacccaagtttcaccatttgagaagggagaataacattaaataatagtacccttagggtttttggagtaaataaaataatgcaggtaaatcatccagcaccgtgccatctacagagtaagcaaataagaattgttggctgggcgtggtggctcacacctgtaatcccagcattttgggaggccaaggtgggtggatcacttgaggtcaggagtttgagaccagtctggccaacatggtgaaaccccacctctactaaaaatacaaaaattagccgggcgtgttggtgcgtgcttgtaatcccagttactcgggaggctgagtcaagagaatcacttgaacctgggaggtggaggtcgcagtgagtcaaggttgcgccactgcactccagcctgggcagcagagtgagactcttgtctcaaaaaaaaaaaaaaaaaaaaagaaattgttacttggttttatttgctgctgttagttctgtatcttggtgttcctccaaaacaaaatttgtaattttttcatttttctttgacacataatctggtctattactttaagtcttcattgccctctccttcctggctcaaccctatactcccctccttacttctgtgtggtattcaggtgatgaatgtggattccgttttgagttggagaaatttctttttgtcagtttggatttaattttaagaaataatgaggtaagcatttaattttggggttagtgctttatctggtaactctgagaaaaggccatatatgttttaaaaatttacagggaggtttatatattttttttagcatattaactttttattcaacaatttgccagattttgaggtaggtaggggttagctgatttctcacgtcttgaatttcagtcagtcctatgacctgttagtctggacccagcattgctttttaaaagtttgtcttttgctgagtactttttcattgctttttcctggggcagagagccgagaagagatttcaggagatttgtgttaatagttaattgatccacatgtgaaggttgtgagtttaaattcccaatttgctgttccattgctacatctcgaagatttttcctgcaattagaaactacttaaactgttaacttttatctattattttgaaactagacatttttagtgtttaaacttttttaacattaatgtacaaatgaattgttagcattgagaaataagacacctgcccccaaagtggtaccatactaaaggttttcttgtttggggaacagttgaaatggtcctgcaggcaattcctagataaaatttctgtacacccaaggaagaacattttcttatagaggatgactgcctttggagaagaaggaaattttaacctgcagtttcttaacttacgtcttattcttgttttgttcattctctttctctttgtgtctgtctctgtgtgtgtgtgtttgtgtgcatgcgtacccctgttttgggataaggaagttgtaggaattgagtggggacactttttttttttttttgagacgaagtttcgctcttgttcaggctagagtgcagtggtgcaatggcgtgatcttggctatctgcagcctccacatcctaggttcaagcgattctccagcctcagcctcccaagtagctgggattatagacaggcatgtgccacaacactcagctaattttgtatttttagtagaggtggagtttcaccatgttggccagggtggtcatgaactcctgacctcaggtgatccacccgcctgggcctgcaccatgcctggccgagtgggagcacttttgttgagtaggtcaagaatactgctttcccttggtagataacaggctactgcttaccgggatgggattttaattcatctgattgctgaaatatcatggtctttcctaagctttgaataaaaatagtctgctccattcagttaggaaaataaattgataactttaaattgggggagtagagtgggaagagactttcttaaagctactaaaaaaaattttagctgggcacggtggctcatgcctgtaatcccagcactttgagaggctgaggcgggcggatcacttgaagtcaggagtttgagaccagcgtggccaacatggtgaaaccctgtctctactaaaaatacaaaaattagctgggtgtggtggcgggcgcctgcaatcccagctactactcaggagctgaggcaggagaactgcttgaacctgggagtcggagggttgtagtggacgtagatcatgccactgcactccagcctgggcaacacagcaagactatatctcaaaaaaaaaaaatgtctctctctctctctctccctctctctctctctctctctctctatatatatatattttaaaagtttctttttcaaattaaagttggtctttaaaattgaaacagattttgtgatgccacttgaacgcctttttttctggttggggaaaatggtctttaggatattaattccaccgtgccttccttaatgaaaagtgataatgagtaaaggattttcactttgcgtgtagacagtatggagttaatagtcatgaattttgttgaaaggccttgatcttgaattactttgggcagagctgctgagtctgtttgagattgaaacttaaacttgtagttggtaggccttagatttatttcttttgcaaagaaaaatgtgtttcaaagatgcaaagaaatataaattgtcttaaattgtacttgagaataattggactgagctccttgatgtcttataaattatattttatttttagtgttttataaaggccatgtgattatttgttgcatagcactgaacagctttaacttatagtttaattaaaaatgcagtcagtttattgtcggtatatactaacagtttaatattgccgtctttaacttactgtcaccttatacaatgattcttttttctgggagaaagctctttatccatgtaagtaaaattcagcagtagaaataagaatataagtgttaaaaagacatccgatgttgctttcttttttgactttaaccagatttcccaaatggtaacattttactatatttgcttattccctgcaatatatggtttttaaaatcatttgaatgtaagttgaagacatgatgccacccttatccttaaatatctctttgtgtatttccgaaaaaccagggcatttgctgtcttcttttttttttttttttttgagacggagtctcactctgtcacccaggctggagtgcagtggcacaatctcggctcattgcaacctccgcctcctgggttcaaggcattctcctgcctcagcctcccgagtagctgagattacaggcgcccaccaccacacctggctaatttttttttttttttgagatggagtttcacttttgttgcccaggctggagttcagtggtgcgatcttggctcactgcaacctccacctcccgggctcaagccattctcctgcctcagcctcccgagtagctgggattacaggcgcttgccaccatgcccggctactaatttttgtatttttagtagagacggagtttcaccgtgttggccaggctattcttgaactcctgaccttatgtgatccacctgccttggcctcccaaaatgctaggattacaggtgtgagccactgtgcctggctgcatttgctttcatgaataaaatatactaacctaactcagaaattaacattgatttgttattatactattacctgatgtgtagaatttgtttgaaatttgccagttgttccagttacgccttttatagcaaaagaaaatctcagattatccaattcattatttccatgtcttactttggaacagttctttagtctctgtgttttatgacattgatatttttaaagagtacaaattagttacttatagagtcccctcagtttgggtttggctgatgtttcttcatgattagattcaggttatgcattttttggggggcagaaataatacagaaattatgtgttattaggcaacataagatgtgtttatttgaccacatacatgccttttgactcagcagtcccaaatctcagaatttacccagaagatgcacttcccacagtatgaaaatacacatgtacaaggttgcagcatttcttaattacaaaaattaacaagcagtctacgtggtaggaatatccaatggagcattatgcacctgtgaaaaagactgagggcatgattaactgatatggagtgctttcttggatatgttgttcacttgtcttggtttgtcttgctttcaaacaagcttgtccaacactcagcctgcgagtggcatgcggctcaggacacctttgaatgtggcccaagacaaattcataaaatttcttaaaacatgagattttttttttgcaattttttttttaacctccccagctatcgttagtttagcgtattttatgtgtggcccaagacagttctcccagtgtggctcaaggaaatcgaaagattggacacccctgccctaaaggaatacctgaggctgggtaatttataaagaaaagaggttttgttggcttagagtttttgcaggctgtacaagaagcacagtactagcatctgcttctggtgagggtgtaaggaagcttccattcatgacagaagatgaaggggagtggcatgtgcagagatcacatggtgagaggaagcaagccagtgggggaggcgccaggctctttttaacaacctgctgtggtggaactaataagtaagagctcactcacaccccagtcccagggagggcattaatctattcatgagggattcatccccatgacccaaacacctcccattaagccccacctccaactttggggatcagatttcaatatgagatttggaggaatcgcacaaaccaaacttacagtcagtgaaaaaaaagtgcaaaagtatctactactgtgtgtatactaccttttgtgtaagaaagaaggagaaataagaaaatacgtatgtatttgttcattggggcaaaaacaaaacacaaagataaattggaggttgataagattgatttcctagaggatgggtaaaaaggtatatggtggaaaggatagagggaatgggggcagggacccttctgaggatacctttctgacttttgaaaccatgttaatgtttcacatactgagtatataagcagcaaacacaccaaccaaatcaactgatgacaaataaaaacaccttaacagggagtacaaatagaaacaaatgaactgaaccgtatttcaaatgagtaacttaactacactgaaggagtgaaaaacaactaatttaggtaacttttgatcctagtatttgaactctgtcctcaggataaagacaaaaagattgaaagaaacattgaactctagttaatagagttaactagaatttttggtttttgttgttgtcataaaggcatgggtttgcaattttgaagcaattgtctatactgttataagcaaataagtaaatatattgtggaaaatgggagccagtttctcactgttggagaagggagttacaaaggtgaaaaatgtgaaggttaaaatgaactctgatgtttgattggaattgcagatagtggcataaattcatagttttagaagtatgtagatataggccgggtgtggtggctgacacctgtaatcccagcactttgggaggctgaggcgggtgtatcacgaggtcagcagatcgagaccatcctggctaacacagtgaaacccccctctctactaaaaatacaaaaaaaaaaaaaaaattagccgggtgtggtggcgggtgcctatagtcctagctactcagaaggctgaggcaggagaatggtgtgaacctgggaggtggaggttgcagtgagccaagtcgcgccactgcagtccagcttgggtgacagagcaagactctgtctctaaaaaaaataataaaaataaaaaatgaatacaaaaaattagccgggcgtggtcgcgggtgcctatagtcccagctacttgggaggctgaggcaggagaatggcgtgaacctgggaggcggagcttgcagtgagccgagatcgcgccactgcactccagcctgggcaacagagcgagactctatctcaaaaacaagaaacaaaaaaagaagtatgtagatatagaaatagatctcattatggatacacatgcgtacatctgtacatctttttccacttctgtctgctaagatggccaggaagcagtgatacccctttagcaatgagatcacctagcactagatcttggtttctaaataccattaatactattctctactggaaggaaccttagagaaatggaggattccagaataggggaaggaaaaaatacaaaatatgcttggagcatcttgtagtctcataagggagtgctcaaaaaggtaaaatgatggggatatttgaaagagacacaggagccagcctggcaaaactcccattgactgactatagggcaatttaatcattgaaataaataaggcagtacttgtttattacccataaatagagtaaggatctatgataaataaatgatctagaagtccttaatgtagaattctgactaatgaatgaacataaaggaaaaggtggaattagtaagttgccttttggcaattataacagttgatttaagtaagaaccataaatggatcttaaaactaagtgggtaaaaatggatgttaaaactagtatgtgaaagtttgagagtagtagatgttaatatagtctcaaagtatgttctcataagttattgttaattttacagggggaaaataacaactttacagggggaaatctgacaccaacttgcccatgtgatgaaagtcaacatctttgatgttactctacataataataatgagcagagtttgttttactttgttatgctaatgagatcttgtctttataatttgttcagcgaggcattgaatgaaattaagcctaaaggaaccaagcagagcataaaggggaccaggtttttttctgtttaaaaaatatatcttcttaattttgtagccagatgtcttgggagggaaaggttgataaatttaggttaggccagtaaggttttgtccataaactctaatctttatttagcataataacttcctccctttgcaccaagtgtgtcttttgctgtacaactgtttttgtttttttctgtgttctgtggtggtttttggaaagtagattttttttttctactggaatttatcttaaaaattatttatattcttttaaaaattttaaagacagggtcttgctctggtgcccaggtcaggctgtagtgtagtggtgtgatgacaggtcactgcaccctcggaactcctgggctgaaatgatcttcctgcctctgcctgccaaagcgcgggcactacaggtgtgagccactgtacctaagtttttgattttttgtagcgacgaggtctcgctatgttgcccaggctggtcttgaacttctggcctcaagtgatcctcctgtcttggcctcccaaagcgctgggattacaggtgtgagccatctgtccctgtataaaatgatttatatttttaaacatacataattagggaatcagaaaatagtgtcttattcccagttacagaaaatgagaattaagcacttttgttaaccctgtttctacccactcctttcgtacattttttgtccttatttacaacaaccaaaattgtgtcagattcagtatttttaaaagatttcaaaaatcttctgcattctgttttgttattacaattacaatagttaatacccattggcattaatccgtttgtcattaagggttattgcttttatttgccatttctatcattctacctggttttagtgtttacaaacaatcctcatgaacagctagttttaattaattatttttaaaattgtctttatttagagacagggtcttgctctgttgtccaagcgggagtgcagtggcatgatcatagcttactgcaacattgaaactcctaggctttagtaaccctcctcctgtcttagccctctgagtagctaggactacaggcatatgccaccatgcccgtctaacttttttatttttattttttagagatggggtctcattttgttgcccaagctagtcttaaactcctggcctcaagcaatcctcccaccttggcctcccacagggctggtattataggcgtgaaccactgtgcctggcctttttatttttaaattgacagataaaattgtatgtatttattatgtacaacagggtgttttgaagtatatatacattgtggaatgactaaatatagctaacatacgtactatgtcacatagttgtcatttttgtggtgagaacatgtaacatccactcagctttttacaagagtacaatatattgttattaactatagttactatgctttacagctactttttattttgaattgtgatttaaagaacatttccaagtactttttactgaaaacatatctaagattaaatttacttttgcatgataaatgatgatttggctgggtataaaattattgggtcccaacatttttgtgttataacagtagaggtcctgctttatttgttatctttgtctggcctcaagtttctgtagaaataacttcactaggtgtatgcttgcagcattctcttatcattggaaatggacacatttatcaggatatgactagaagtttttctctgtcactagtattctcagggaaatgatgaaacactctcaggtctgggaagacttctccatttttgtattcatttttttcagttatcttcttaagtacctattatttacacattgattttctgtaactttatagtacattgttttaagttagctaatgaaaaggataagatcctctctattctaggaagatttatcaaatttgtcttctccatccttgatgaaattttctggatgtcacacataattactgtctccaaaacatatttagtgcccttgatttctcggtctgatattaaacaacggtaatgttctcttgtcttttcagaaggccacaaaactggtatttttgtaaagcttgatactatttaatgaaacaacttacagggaagtgatttttctttgtgtggaagaatatatttgtttttcttgtttattcatgaagagttgctcatagctatttttggtttaggaagttaagagctggtcatctctcagaattgccttggggtactgagatttctgctttgttttggtgctaaacagcaagttgacgttggagagcttcagtttcttggagattatcagtagcagaatttcaacaaatacaaaattttactacaccctctaaatcttaatctccaaatatgggcttttggctgagaggtatacttttgtagaattagagatgtttaaaagggatagttttcaagtttttaaatccttcataccacagctttctgcagtgaggcaagtggaagagtgtgtgtattcttaaaagaaggttatggattagaaaacgatccctttttccttcttttgttcttctgtagctcagaccttgaacaacgatctgtgtctggttcaccttgacattatcttaaaccctgtaagcactagactataagtattttagtagaggactttatatatttggtgtgctttgtctgtatctatgtctcttagttatatttgtacattttattcatatttgcattttcagaatcgtagactaggaatacctttgttacacagaactaagcacaacaaaatatttgttgctatttgctagtatcaagttttgagtggaggccaggtgcggtggctcactcctgtaatcccagcactttgggaggctgagtagggcagatcacttgaggtcaggagttccagaccagcctggctgacatggtgaaacctcgtctctactaaaaatacaaaattagctgggcatagtgacacgcgccaataatcccagctacttgagaagctaaggcagaagaatctcttgaacccaggagtggaggttgcagtgagctgagatcacaccactgcactccagtctgggtgacagagtgagactgtctcaaaaaaaaaaaaaaaaaaaataaagtcttgagtagggcacaggaaataaatagtggaaaaaagaggcttttggaaagatgagttgtatctattatggttccatagcatctagttactgaagaagagaaagagctggctatcattttggatttcagaaatcatgtgtggcatatacacgttgaatcttgagttttagaagttgatccgtagcattcggttttagccaaaatagtctttggagaagatagtcctttcttaatttctgtctggcaattctgacttgggaagtatacaacagtctgagagtaaggtcttaaaagttgtaacttttgttttatttcctgatgaattttctcttaatgcctgtttttggttaatgacgatgtggttgacgtttcagtagtcaaaagatgcgagctgaaaggaaagctaagcaggtagtcaagtcaaactgcagaggaagatttgtggtagatttaatgtttaagtttcagaaatcacatggaaaagatatgtggctattaaatttgtaattttgtcctttttgcctctaaaattaaggtgtgtcaactaagggaaatttgccccatgcaagtaggcttgtgtgcaggtacacagaggcatacattttacttgaggaaggagtgaatttaaggttagagagaggtttgtgggtttttggaataaaaaagtggaaatgtgaaacaaaagttaagtctgataatttaatgacgagttgcagatgtttaaattaatgattgtagtagcttgagtactacatgaattattattttcagataatggcatggaatttccatgccaacaagttggtttaagtgaactacttaaaattttttttttaaattattttgtttgagacagggtctcccaggcttgagtgcaatggcacaatcatggctcactgcagccttgatgtccccggcttaagtgattcttctacctcagcctctccagtaactgggagtacaggcgtgcgccaccatgcccggctgatttttgtatttttttgtaaagatgggggtttcgccttgttgcccaggctgctctcgaactcctggactcaagtgatctgcccaccttggcctcccgaagtgctgggattacaggggactactttatttttgttttattttattttattttatttatttttgagacagggtctcactctgtcacccaggctggagtgcattggcgcgatctcggctcactgctacctccttctgccgggtagaggcgatccttccacctcagccccggaagtagctgggactacaggcgtgcaccatcatgccccgctaatttttgtattttttttggtagagacggggtttcgccgtgctgcccaggctgttgtcaaactcaggctgagctcaagcgatctgcctgcgtgccttggcctcccaaagtgatgggattacaggcgtgagccaccacgcctggcctacagggaactactttaaaattatcaagtgacttaatgtgaaaaatttctgataaccactgcgaagatgttttatgacgaagcactttgattcatttgaaagttaattaagaatggagtaggaatggtgaggttgcgtattagtaattcaaatttaagttttgagtctttgggttatttccttactattatgaagcctaagaggtgtgaaaatagtatggaaaactttgtcttctgtttcactattagtctgtaatttttagtttttaattttatatttagagacaattgtttattttgtctccttcctcaaatcattgcaaagtatatatttagtgtctatttctttgtagtgagagtttcagaaagaagccattggctgagctgattatccaatgaagttgtctgacatgagttactttagtttgtggttttagatgaacagtacatggtgcacagctgttgctcaaacagctttgttccagctgtcttactggcctgtcacaaaataccccacattccttttcttttaaaaacagaacctcttgtaatattctatacattattacttaaaatggatctagtaattagtgacttttcttcgtttttactcctatcaatagctgtttacttagagtagtgccaaaatgaattatgtgacatagatttcagccttgtcatatttttaattctttgaaaattaaagttgcagttgtgaaatatgtatatgagacaagttaagtgattaacattgaaaaaggcaccatacattaattatgtcccccaaataagtagctagtatctagataatgaaactaggcatcttctattttcttaatattaaccttgagtttgcattaatttcaatagaattatgaaatgaaaaggtataatatcatgttctatagcttgtatagaacctgtattgatgaactttggtttgtatttttgataagctggttggttggttggacttcattttcctatacaatgcggtaactgaattatattactaagggtttcaagttttgttttttaattaggagcaggtacctatgaaaaatacattgaagtaattatgactatttcattttctaccagttacaaccctttatgattggaaggcagcatggcatcgtcatggtcattatttccatcctacagatgaggaaatgcaggcttgggaagaagggatttgcccaaggtcctgtagcaagtaaaaagcgaagctgggatttaagttggtttttgtatttctaaatatgatcctcttctcactacagaactattaacgttaagttggaataaaagtgccaacacttactagaggggagctgaaaagagtgatagatactctttctgaagttcttggtcatgtgactgtgttaacaatttgaatctgggaggagcagtggggtaggaggagagggaagggtgaggtttcacccaaaagcacacttgatgtatttgtatttctattaaaactgcaattgatggctactgataaaagctagtatagagctgaagatttgcagtggtgtcctctccaaaacgtagtttaggaatactatcatatgattactaatgttgtataaatgcatgagaatgacagataccaaattcaggatattgattacctcttggtgttgggggaggagagaggggaatattattgaggaggcatgcaagagtcttcaatcatattacaaatgttttgtttcctaagtcgggaggtgagtatgcgtatttatattttttcataacattttctgaggtattttatagttaattaagaacagagaatgtactctgacttaactgtgtagtcaaatggaaatttttagctgttaatttggtgttaaaggtatcatgacttgtttgacgagacacaagtgttttcttcaggggttttccttcagagtaggaaactatttttatttttattttttttttggtccttctcaaacaacaaataaaacttgagtacattcttattacagtaagaaattcatatttcaatttgtggataaaacttgtacgtgaatgtgtgtgttatgatttgctttaagaattactatacatggtttctgaagatttctccaaagcacagtatctaatttttgtcttggtagttacaggaactgatgattaattttgcctttagtttcctatatacagaaatgcctttaacttttctcagcaccgaattcataacactatttgtaggtatacaaaacaaatgcccacataatgtagtttgaggtaggtttaccgattgaaagaaaacctggagtatcatactagacctgtgctctgtgctatgctgttgactttttttgctcatgaaatttattcctttagaaaatggattacttttggaccgagaagattttcatcaagtgttgaattttcagggggagggataggattatttatgtaaaaaatgtgctgccactcttttggtggctttgcgtatgacaggaatcttattttcatcatgggattagaaaaaatgccgtggtcattgttcatcttaaaggctttgcctgatttgggtacttatgcctttgagagaggtgggatgggggagagaaaaggaattctgtgttcttggaacaagaatgtgaaagtatatacatttgaatgttgctaatttcctcaagaaaggaactctccatctttagatttacagattataatgttcaagaggaaatgggtaggggtaggtaagaggtggaaggttggggaaggtggaaaaagtgctcttgttcttgagtttagaggtttggattatatcctttttgggaattacctaggaattaactcatggtgtaaattggggatcctttgatgattgtggatagatttttactgaactaagggtctaactcttacggtattgatttttgagaacttgaaaaagcatttgcttctagcatggtttagttttgtaggtatttttctttcggtgtcttctagcagagccattcttctcattccagtgacaagtagaagctgtggtctgttaagactttttaataaattggaaatggttcttaatgtagggattcttaaacttttttgtgtaaagggctcttggtagtttggtaaagcctgtgggattctcagaatacttttttttggctgagtgccggtggctcactcctgtaattccagcactttgggaggccgaggcagctggatcacttgaggtcaggagtttgggaccatcctggcctatgtggcaaaaccccatttctgcttaaaaaaatacaaaaaattagctgggcatggtgggggtgcgcctgtaatcccagctacttgggaggctgaggcagaaatcgcttgaaccttggaggcgnnnnnnnnnnnnnnnnnnnnnnnnnnnnnnnnnnnnnnnnnnnnnnnnnnnnnnnnnnnnnnnnnnnnnnnnnnnnnnnnnnnnnnnnnnnnnnnnnnnnnnnnnnnacctccccccacaacccccaaaccctggctcaagcaaacctcccacctcagcctcctgaatagctgggaccactggcctgcaccaccacacccggctatttttttgtgtgtgttcttagtagggacggggtctctccatattgcccaggctggtctcgaactcctgagctcaagccatctgcccacctcagcctcccaaggtggtgggattacaggcatgagccactgctcccagccagaatactatttttaaatgtataaaataaaatgtatatgattataaggggaaccagtacatttaaattcaaatatcaaaatgttagaagcaaaattatttaactttttaaaaaaattctttttaactttaataactttcttttttaactttaactttctattttctttctttctttttaactttagtagtgtaaatgctattctgacttacctgcagtagctattacatgaaaatatctgacgtctgttgttgacaatcagcaggtattgctagagtgctttatagaggaagtgctaagtttcagttggaggtatcagaaaacaaaattacaacaaatttaattgaaagatctaattggctttttgatcctagaatctggcaacatctcattttataaaatagaatgactgttctgatgaactgagcacagcagtttggctttatagacagaaaagggctgaagaaagcaaaaacaaaacaaaaaatggatcggtctttttatttttttattatagattttttctcccccccccccctttttttttttttttggtagagacagtctcattgtgttgcccaggctggtctcgaacaactggcctcaagtgatttttcccacctcggcttcccaaagtactgggattacaggtgtgggccactgagcccgggccagctgatatttttaaagttattttccttgtaaaggttaaagcagatgggacttccttattgtgccagctaaaattggcctgtttgggtatttggctgtcatctctcattctcctgatttctagaaggtcagataaatggcgtggtggtgtggaacttcattcagcatgggtaacttcattttggtttggtcttttgggcgtagtacagaagctcagtccaaacagatggcgtcacataagtttggtttaacagaggttagtgaaaaactgtttccccatcatgttttgaagttttaaatcccaagaacccctttctattgtggtggaaaaaaaaaatcagaatttgggattgagtcccatattcactgttttgtagtatctgtatccttctgtaactctgagctttaaatccccaaaacccctttttaatgtggtttaaaaaaaattaggatttggagccatttgacttcgggattgagtctcatctttacatgttgtgcattcctaattcaaaaatctgaaatccagaatactccaaaatctgaaactttttgagtcatgatatgatgccacaagtggaaaatttaaaacttgacctcagttttgctcttgaccttgaaacaaagtacacaaactttgtttcatgaacagaattattaaaaatatgtgtcaagctaccttgtagatatgtgtaaaaagtgtatagaaacataaataaatctcatgtttagacttgggtcccatcccccaggataactcatgtatatgcagatattccaaaatccaaaataatttcagatctgaaacacttctagtcccaagtatttcagataagggatactcagcctgtacttactagtatctgcgtccttatgcaactctgagccttaatttcctcatcaatataatggggatgataatagtacttaccttataggattttagctttttatgtgggtactctaggtattacattatttatgtataatttattgcaacctactgatactgtcattttgccagtttgaataaagtatggaaacctttatgtccctttattttcctgtttataatataacttttaaatattctcactatatacattttacagtattaactttttttttgaactgtcaagcatactatagaaaactcgagaaggaaagctatggagtttgtccatatttttgctaaccatgttttttcctttctgatgtttcaaggttccttttattgtttaaggaactttctttagccattcttttagggtggcccttctggcaatacattctctttggttttccttatctgagaaggtcttgatttctccttcatcccagaacaatttttaaaaaatttactgtacataagattctgagttaatacagtagtccccccttacctgcaagggctatatatttcaacccccccagatgcctgaaactgtggatagtattgaaccctacatatcctgtttttccaataaggagatagatacctacgataaagtttaatttataaattaggcacagtaggagattagattattaataaaatagaaaaattacaaccatatactacaatagaagttatctgaatgcggtctttctcaaaatatctttttgttctatattcttatgatgatatgagataatgcctacttgatgagaagcagtgaggtaaatgatgtaggcattgtgatgttgcattgttactattgaccttctgatgtatggtcagaatcatctgctttggatgatcctggatcgttgaggcatgatgatatggcttgttgaggcatgataatgtcaacagttgaatgttcagagcagacagtgtcagtgttgatgactaacggttgagtagcatatacagtgtggatactctggacaaagggatgattcattgtcctgggtgagatggtgtgagatttcatcaggctactcagaatggtaaacaatttgaaactttatttctgaaattttccatttaatatttttgaactgtggttgactgtgggtaactgaaaccaaggaaagtgaaactggggataagcaaggtactgtagttttctttgatcagcacctgaaagatactgtgccacttcttctgatccccatggtttctgatgagaaatctgctgtttttctcctgtaggtaagatgtttttcctaggctgctttcaatatttttttgtcttttgtttttagaagtttaattatgatgtgtcttggtgtagatttcattgggtttttcctctttggggtttattcaacttcttgaatgtgtaggtttatgtcttaccacatttgggaagttttcagctgttatttcatgtactttttcagctctattctccttgtcttctcattgtgatcctctgataacatggaagttagatcttttgtaacattcccaaaggctattgaggctctgttcattgctttcttttcttcagtgtgttttctgtttttcagatttggtagtttctactgttgtgcattctagtttgttgattcttctgtcccttccattttactgttaagaccatccactgagctctttattttgattattgtattttttagttttaagctcccatttgtttctttgtacttctgtgtctttactgagactttcatttctttgctgagacttttttttcatttgtttcaagctgttgaaacatttttatggagactgccttaatatgtttgccagataattctgacatctttgttatctcgatgttggtgtctgtcgattgtctttttgtcatttggtttgggatcttcctgttccttgggtttttcttttgaaatctgcacattttcatattttgttgtgtggctctgtatttttttagactgggttagctggcttttttggataccactctggcaggagaaagggaagtgctgccttgttactgtgaggtgaggcaggtgtctagattccctactcagcttacattaagtccaaaatgtggggacgctctttattactgcctggtggggatggaagtccattgacactgctgggagaaggaggttcatgctggccagttgggatgaaagtcttagctccccacttggtcttccctgacaccactgcagtggggtgttggggtgcccctttacagccttttgagtgtgggattctaggatccccacttgaccttccctggtgtgggcagaggttttttctttggtgtctgttgggagtagagcagctgtcatctaaaagttttctgtcttgctgggacgtcctgttctggtcctttagctagagagagcattcttttgttagtactttttttgtctgtgtctgttggcatttccatgttgctggctttttcaactccaactctgggatatatgttgtaaaaagaaaacccaggaaactcaccacagtgttggtttcttggattccaaagtgttggtctatatgccttccctcaaactttcagagtcttatgtttgtcaaggatttttagtttttagcaggagaaatagggaaaagtatgtctactctatcttttcagaagaaaaagttattttaagggctttttggtttattaagtaatgttgtaattgatgttttcttctgaagttttgattttgtttctatttttacttctctgctagctcaaaaaatagattgatatttttatgcctcattcaaattgcaagtcattttgtcattcatcttaatttatgatgagttcagttctgaacctgttgagtttgagatgcttcaggggctgccatatgaaggtatatatccctttttataatcagaagagaagtgtaggtaagagatttaggtgcagaggtagatttgggaatgtaaagtaaggatttttgaagctagttggtgtagatgaggatcattcatgttaaggaggtctgccggctcaaggtgggactctggaagcctgccattaaaagggactctggaagaagaaaaggaacaagatgactgaacagaacccactggagaactagagacacaaatcatgttaggtattacagaaaccaagagaagacagtttcaggaatggctttgagtgttcagcagggtcacaggtcttagattggtaaataatctgatggtgaaaattgtaagtttggattcagcaatgaacaggacacagagagcagtgtgggactagaagccagaccgctggatgggcagtcaagaaaaatgttgatggaggagaaagaaggaaggtaagagcagaggttggggctaggttggtggtagtgcagtggtgcatgtgagtgtttttagaaaaagaaggtgtcttgtttatatgctgaggaaaaagctagtacaatagggaagatgttggaggagggacagttgttgatggcaaggacctttgagaaggttggaggagatttgatttctaactgaaggataaaagatgggcagaataatatactttttttttttaacactcgctagaagggtgggaaggatatttatatggctatgtttatggatgcaggagagtttttagaaacaaggaagaacttgatgggagtcccagctagataattttctttgatgtaggagacagactaatccattatgtgtgtgtgtgtgtgtgtgtgtgtgtgtatgtatggatgcttttcaaaaaagttttaccctccatcagtaattgaataggttacatggatatatcagaattatatatataacttaatggatatgatcaacaacaagaactgcatttttaaaataaatttgctgatgatacaaataattctcatatcttaaaatgacagcaaggtgagcagttgaaaaacaaatcaataaacattttaaattgttagccctcactgaataggaaaaaaaaaccaggacaaagtaaaacaataaacgatttttaaattatcaaattgacacaggttagtaaaatactacctgttataggtaaagttatgggaaatgggcactctcatgctgctattgagattggaaatcaacaagctgaattaaatcttaaatttcataaatttcgacccagtagttattttccaggtaactttttctgatgaagtaatttcctatatgtgcaatgatttgactgttgcttaatctaaaaaaattagaaatcacctatgtggtcaataatgaagatggattaaatatggtccatgtcattaaaattacttttaaaagactggtaagctaatgctcattaaaagtaagggcggggctgtgtgagatggctgacgcctgtaattccagcactttgtggagggaggtggattgcttgagtccaggggttcaagaccagcctgggcaacatggcgaaaacccgtctctaaaaaatttagccaggcatgctggcacgtgcccgtggttgcagctacttgggaaacagaggttaaaggatcacctgagcctagggaagtcgaggttgcagtgagctgtgatcgctgccactgcactccagcctgggcgacagagacctgtctccaaaaaaaaaggggcagggtgggggtggggaaaacagattataaaatgaaaacagattataaaatgaaattcacagtacagcatagatttaattatatatgcataggaaaacaggacacaagctaagagtgggcatccttagatggtggaattatggatgattttaattatttttgtttttttcttttctgtgtctggattttctttattgaacatgcaatatgtttataaggaaaaggaatttttaaaacttgagtttataagcttaagggaatataattggtgtagttttctagagtatagtttagtgttatttatcaatagcctcgccttttcctttgacttgataaatacacctccagggataagaaccataaatatctatctacagtgatatttatcatgacatgacttataatagtgatatactagaattgtcttaaatagaccaatggttaaatataactcttttttctagtggacttaaagcagatcggtgtagcttataaaaattatttaagaaatatatatgatgacataagttgcttatactatgatttacctgaagaaaaaatactttttgtgttattttttaatctttaaaataatagataaaacaatgggaagaaatagaaattgacccaaatgttgagttatctttttctttatactttcataaagtttttacaatggtgtaattattttataagaaaaaagttgtaaattaatttgctaattgatataaaatgatatttaaactttttttggtttatattgttattgtttccagggaactctgattcttatttttactgttgcattttttttccttgtatgatttgttcatgtctttgcccattatctgttactttacttggaaaagcctgtcatgtgagttttgaaaaattacacaccttgtgtaaccatcattacaagcacatataggacatttctatctctccaagaaggtcccttgtctcccttctgactttttattcccattgttcagttttgcctgtttctagactttatataatagaaatatacagtatgtactctttttgtgtctgggatgtttttgcttggcatgatgattttgacattcatctatgatattgcttgtttctatggttctttattttattattattattactatttttgagacaaggtctcattctgttgctgaggcttgagtgcagtggtgccatcatggctcactgcagcctcaacctccccaggctcaagtgggcctcctgcctcagcctcccaagtagctgggactacaggcacacgccaccacgcctggctagtagttagttcttttttattgtttggtagtatttcattgtatgatataccacaatttacttgtctgcttattgatagaacatttgggttgtttccaatgttcattaactgtgaataaagctgccccagacattgatgtacaagtcattgtttggacttacattttcatattgcttggataaataccaagttgtgattattgggtcgtatggtaagtggatgtttaactttgggaaacaggtggtttcttataaaatggttgtaccattttacattcccagcaactgggtatggaaattccagttactctgggtctttaccgatactgggtattttagccaatctaatggctgtgctgtggtatctcattgtggttttaaatagcttttccttgacgactaatgatattcagcatctttttatgtgcctattggccattggtatagctccttttgtgtgtctgtatgtcttttgtctcttttgaaaattggattgctttgtgttactgagttgtaaagtttcttaatatatttggaacacaaatcctttgtcagctgtgtattacagatagtttcttctagtccatatcttgccttttcatttgttccttcccttttaatacttacatcctctttctgtagtagacttgccagaacttttttttttttttttttttttttaagagttggggatctccctatgttgcctacgctggacttgaacttctgggctcaagtgatcctcccgccagtctcctgaatagctgggactatagatgtgcgccaccatgcccaggccagaaccttataacaaaatagttcaaacaaaatgaacacagtagataaccttgttttgttaactatttttttctacatcgtgtacaatggttttaaaattttttggataagttatataagtatcctattagtgttttcctttaatgttatttgcaatgtaattttaccagatgctgttttgatatctgtagaaatggatcctctttgtttttgttaagccattactgtgatatgttagatcattagaatatatttacttagtacactgaggggttttatacaccatcattttaccccagtttcttgtttattttattaagttgtatgggtgttgtgtttcttgtttccagtttctaggttcacagaaacttgtgaccaagaatatatttgacttgaaagatgaattgggtagtatgttcatcttcatattctcccagggctttaaattttatgttctttaaaaatctggatttagggtcaggcgcagtggctcatgcctgtaatcccagcactttagaagtctcaggcagcaggattgcttgagcccagcagtttgaggctgcagtgaactatgatcacgccagtgcacaccaccctgagcaacagtgaactgtctctaaaacaagcaaacaaacaaaaaacaaatgaaatttgccactgttattaactatagttactcctattgttgataaacaattttgtctatttcatcctgttgattcagttttctacctcttgaaatgtaagctttatgtgtaaatacatttttcttcttaaaaatttggtgtgaaaacattgccttaattaaatttctcaacatatagctgtggttaaaagtatcttatttttgttacagcctttttcgtttgaatatttatatcatctgaaaaaaaaattttttttaatgttaactacatgtcatcataatgcctctgctttttcagggaatctgaaatgataaagacgtccccctcatcagtggtactcatttaagtttctgagtatggtgttcccccaaccccaaggaaccagttttttgttttttaattgaaacagggtctctgtcctccaggctggagtgcagtagcacaatcatggctcactgcagcctcgacctcccaggttgaagggatcttcctacctcagcctcctgagtagctgggactacaggcgtgtgccaccatgcccggctaatttttaaattttttatatagattgggcctcccaaagtgctgggattacaagatgtaagctgctgagcctggccaggaagcagttcttaaattatcaggactaccaatgaatagatccttgtatttttccttaaattattttgttctgttttcctttgggtttgttttctaaaatcttagaattcattgctgtgtttttacatcttttaatgaacacattcacattacaccgtgaatactacattgagtcatttggatattttttaattttctttttcattgtttctaagagatagggtcttagtctgtggcccagcctggggtgcagtggcacaatcatagcttactataggctcgaactcttgggctgaagcagtccatctgcttcagccccttgaagagctaggactacaagcatgtgtcaccacgcctggctaatttatttttatttttatttatagagatgaagtctcactatgttgctcaggctgacctcaaattcctgggctcaggtgactgtctcaccttggcctcctgaagtgcagggattacaggcatgggccactgtgcctggccctgtttttaatttcctaatttaaaatgtgtcctttcatcatgtgaatttttattatatatttaaaatttaagtctttgttgatttctgcttttttgttctattttacttttggcatcatggccagaaattggcaagttttagacattagaaaaggtatgtttttgctgtttactgcaggaatcagatccaggtgttgaggggacctacagcttatataattttgaggaccctctttaggaaagaaaatacaagattatgcacatgtgaatatttgtttagaataagaaaaggtatctgtgtatgcgaggggtctaaaagcctaacttgattcattttgtgtttgatctatctctgctttaaaatatataattttggccccacgtggtggcttgtgcctgtaatcttagcactttgggaagctgaggcgggtggatcacttgaggtcaggagtttgagaccagcctgaccaacatggtgaaaccccatctttactaaaaatacaaaattagctgggtgtgggggctcatgcctataatcccagctacttgggaggctgaggcaggagaatcccttgaacctgggaggcgaagggaggttgcagtgagctgagatcgcgccattggactccagcctggacaacaggagtgaaactccatctcaaaaaaaatatatatatatatgtatatgcgtgtgtgtgtgtgtgtgtgtgtgtgtgtgtatgtatatgtgtgtgtatatacatatatatgtgtgtgtgtatatatatatatatatnnnnnnnnnnnnnnnnnnnnaaaatttggtgtatgtgccgggcatagttgctcacacttgtaatcccagcactttgggaggccgaggccggtggatcacctgaggttggcagtttgagaccagcctgaccaacatggagaaaccctgtctctactaaaaatacaaagttagctgggcatagtggcgcatgcctctaatcccagctactggggaggctgagccaggaggattgcttgaacccagaaggtggaggttgcggtgagcagaggtcacgccattgcactccagtctgggcaacaagagcgaaactcttgttgaaaaaaaaaaaaattggtgtatgtgtattgcatctgcattaattttagtcattactttgtgtcatgtatatattttttactactttacatactatagctgtttttcttctagtgtttctaagcttttacattgatttatacttttttgttgcctaaatattatttttactgttgcctaatggcatcttaaaattttactatagctcttgccaaataaattttaccatgtttgatattgtttttacacgtgtcttcctggcttgactaaatttgctacattattttttctcactctttttttttttttttttttttgagttggagttttgctcttcttgcccaggctggagtacaatggtgcgatcttggctcactgcaacctccacctcctgggttcaagtgattctcctgcctcagcctcccgagtagctgggattacaggcatgcaccaccacacctggctaattttgtatttttagtagagatgggtttctccatgttggtcaggctggtctcgaactcctgacctcaggtgatccgcctgcctcggcctccaaaagtgcgagaattataggcatgagccaccgcgcctggccatttttctcactctttactgttagccttatgtactttgtaagcactacagtggtagattttatttttagaaaatcctgtcaagacttttttttctctaatgaagccatttaactttgtcacagctacatttggtctaagtttggcttctttgtgttttttcctccatgctttcctatgtttgacctgtgtcttgtaagagacaacatccattctcattacctgccgtatggaaagaagtaaataaaaccttttcatccttgaatttttttttctctattgagttgttacaggtgagaagtatatatgaatctgtgaagagttgttggaacctaattaaattatgtactgcacgtttttctttttccctaaagcatttagagtctggctaaataggggaaaatttatattgtttgggttatgttgtgtcaatttttattaaaattctggtagcagtcatacaaataatttgactttcacatgaaatcaagtgaagagaaaggggggtagagaaagatgctcaggcaatgtaagtttactagtacaaattaaaaggcaattttgtgggtactgataaaatgcttctgaaggtaacataaattgcatttgttcttaaacatttaggaagggcatggaattgtttttctttctctccatccccacttcctcccaatgtgtaagtagaaagattttttcccctcctcttaactctgaagaagacaacttcctttattttgcatttttgggtggtggttatagtacttgttttgaggtttgaccatcctctcttcagctatttttatttttacacaccacttgaagtgagtacactcagtggtattttaactataataatctgttaagaaattcatgtatgcatattgcatcttaaaactgttgttttgatttaattttaattggtttatgctatgtctgcttcatcttagtttttaaacaagtgactacttagttttccacagcagaacagaatagcaaaatcatattcttttttttttttttttttttttgagacagagtctcgctctgttgcccaggctggagtgcagtggcgggatctcggctcactgcaagctccgcctcccgggttcacgccattctcctgcctcagcctcccaagtagctgggactacaggcgcccgccactacgcccggctaatttttttgtatttttagtagagacggggtttcaccgttttagccgggatggtctcgatctcctgacctcgtgatccgcccgcctcggcctcccaaagtgctgggattacaggcgtgagccaccgcgcccggccaaaatcatattcttaataggattgaaatgtttactttctttttgatgttataagtgatttaagatacgacataggagttttaactgcttgattgctcagtgccctgtcccctccccctcccaaatagaggacaacattttgctcttactggaactcttaattttgtcaagtcagctggtataaagatatagaacttttaccccttaaaattcttttactgatttaacaaatttcagaattggtgatacttgtttattttatgtttgtatatttacaatcttttctaaaacttcattagcgttagaaagcacatatttcctgaaatgttttagtataacaatttgtgtagttgagtttgatatgtgtgataactttttatttaaaataaaatttaggcatcatgtaaaatagttaacagtggcatacttcctggcatagaaattcaatatacaaaatgctaaaaattacacaatagcagcagcattttaaaagctatataacagtctagttacttgttttaagctgtcactatttccggttttgtgaaaaataaatatagcattaggtacatgccctgagattttcagatttgcacatattctgtggaagccttctttactactatttttggattccatgctatgggataataaggtcactttttagcaccattcaagaataaaaaaccaagttctctcaaaggggttctagtacacgtccatgttttgctgaatgctattctgtaatattcttaaaaaacatcttaaattcaaggaaggagatgagagaagcatagtgagattccagacttgatcctccttcaaaatgctatcagttgctgctcattccccagcctctactgcattccacaattggacagtattttatgtaatacttagagtttttacaaatcaagtagaagatacaatggaagaagacaccccttttagaatagcaaacaaaaagactacttctacacacttaaaaaatgtgtgttaaatttttttttacagtcttccatacaaaattttaaagcaaacattaaatttttttaagacaaagacttaaacagaaaagcatactatatttccagatctgaaaattcagattcttaacagtgtcaattctaattgttaatctacaaacttaatgccattctaaaataaaaatattgaaaggaagccgggcacggtggctcacgcctgtaatcccagcactttgggaggccaaggcgggaggatcacgaggtcaggagatcgagaccattctggctaacaaggtgaaaccccctctctgctaaaaatacaaaaagccaggcgtcgtggcaggcgcctgtagtcccaggaggctgaggcaggagaatggcatgaacccgggaggcagagcttgcagtgagccaagatcgcgccactgcactccagcgtgggcgacagagcgagactctgtctcaaaaaaaaaaaaaaaaaaatactaaaaggattaaaagaaactcccaacagtactcttgctgaggtaagtgctagtgcaagctcattttgtggtaagacaaggtgaattcaagtaacttctccaatgacaaagctgggaagtggtgaagcaaggcttcacatcagggtaagtttgagggctcagatacgatgatagctaacatgcagtaagtgtttatattattgtgcattaccattccaggtgaggtactatatattttctcaattagaatagcatcttaatgtaaaacttgtgaggctttgctaggaagaatctagagataatacaggctgtgcttagagatttatgaaccctttataatctctcccctcaatctcgcttttttccacatgcataaactagttatcccagcatcactttttgagtactgttctatgcttcccctatgatctgctcttctatttatatatcgaatttcattcatgtggatttatttttaggccttctgttttgttccatttgtcttttttgcctattcttgtgtcatttccattctaaatttcgtagagggtaggataagtttccctgctgtgttcattcaaaaattcattcagcacatatattggagacaactgctatgtgccaggaactttttaggtgctgggaaaatggcattgagcaaaacaaaaaaattctcatgactcttacacttataaacaatttcttggctattttcttgcttataaattttaggttcagcttgtcaaattctatgaaaaacccagtaatgttaaaacaaatttaaattgggtcagttaagggagcactgataccttgacaattctatccatgaagagaatgcttttacactcatatacgttttcctttttttttttttttttggcctctgtttaaagcttaattatttctttccctaaaggtctagaatatatttttactagagttagtcctgcatatcatatatttgctgttgctgttgtaaatggtgtcttttatttgacttaagctttctaatagctttatacagaagtggtatttttttttgctgtttattttttcgacaggttgaggggactatgtagacttttatatccaaataccttgctgaattctaattccaataattattatgtatattgtttcctgtgcagataatcatatcaaatatattcttaaaaatttgtataccactttattttcttattaaattaactaggacctccaatgtaatgttgaataaatatggtaatagtagacatacatacttgttcttgattttaatgagtttcactgtaaaaagtgttgtttgctatagtttttttttttttaagacaaatgtgacattttcttatcctttttccatatctcttatagtgtttttctttagtctgttcatatggtgaattatatttataattttaaaaaagtctatatattctgttcctgaatttctgggacatattggtcataatgtatatttttatatactgttggattctggattctgtttgttaatattttgcatatggactcttttcatgtatgtttattagtgaaattggcctgtaattttcattttttaataatgttcttgtctggttttggtatccagattatactggcctcataaaatgacttggggggtgtatttcctccttttctattctctggaagaatttgtgtgatactggatttacttgtttcctgaaagtttggtagaccttgcttttacaacttttagacctagtttgtgtgtgtgccggtggggggaagagggggaagtttattttattttttcttcctttattagtcatagtgctgttcaggctttctgattatccttttttttttgagacagggtctcgctctgtcacccaggtcggagtgcagtggtgtgatctcactttgctgcaccatccacctcccaggctcaagcaatcctcctaccttagccttccaagctgttgggactataggcgcatgccgctatgcttggcctagtttttttgttgttgttttgtttttgtagagatgaagtctcactatgttgcccaggttgatctcaaactcctgggcttaagtgatcctctcatctcagcctcccaaagtgttggcattacaggtgtgagccactgtacccagccttctaattattcttgaatcaattttgagtttgtatttttctaggcgtatgtccattttgtctgtgcttcatatttattgcataaagttgttcatagtattctcttttaaatgtctcctctagctgtagttatgttcactatagtctgtcctttagttctccttagcagtgtttgaagagatacgctttttagtccatctattgaatttttaccattaggttatattttttatttccataagttctgtgtgtttcctcttaagatcttagtggtcattctttaactttttattttttaaattcacatttgtcttgattggattgatggtcattttttatagcctcttgctcacttgtttgtgatttcatttatttttaacatttaatccggaatcttgatgggtatggctgataaaattttaacaatggttgttatgtacttccctaataagttcaagataaattagactgtgactactttaacacatagatatagatctggattgctgtatttagccaataacatacgtattacagaggaattacttgttggatgattaaggttttcttaggtaaataatttggaaaaaatgttatttgtgggaaatataggaagaaagaaattaaacatcaaggaagagaagcaggaaatgttgctagctgtgtcttcctagatggaatgtgtttgtatagcatttgatatttctttgtgtttttttttttgagacagagtctcctcacattgtcacccaggctggagtgcagtgacgctgtctcagctcactgcagtctcaacctcctgcactcaagtgatcctcgtagtttagcctcccaagtagatgggactacaggtgtgcaccaccatgctgggctcattttttttttttttgtatttttggtagagatggggtttcaccatgttgcccaggctggtctcaaattcctgagtccaagtgacacacctgcccctgcctcccaaagtgctaggattacaggtgtgagccactgtgcccagcatatttgatatttcctgatagcagttatcacctattttgttgggtatatttgtcttgacagttagattgtgatctcttttggggcaaacacttttattggtggtgttttgttttttatacagtgtctagcatagtaactgttaaatagtatatagtcaatagatttattatagctaggtagatgggattttaaaagtactaaacaaagttcaattgtagttaattataatgaactaatcattgtcatatgattacagtacgaggaattataccagaagccactaataactagatctggattaaatataccttttaaatgcattattgggttcaaaaaaaccaaacacattttcaaatgttgtcttcacctcactcaaacaagggtgagcttaaatggaagcaggggagcatttagtgataaaaacacagaacaggcaaaatttcagaaatgggtcagactttcaattagagactgaattttcagccagcaacaagccagggatagtggaaagggagctaaatctggtatttcctttattaagaaggatccatccaacctggctagaagtgatcataggtaggctaaagtggtcttaataggtaaacagcttccctgctctccccactcccacttgctcctggatgatcaaacacaaaacacaagacatggcaaaaataataacaaatgtagcccccaacccccaacccctatacaagaacttcagaagttttgacaatttttgatcattcttttaagtgagtataaagaatgagggactttcgtgccatccttgtagagttagttcccttccctgtcccaccaccatttcaccaagggaaatttattgagaacacctaaaatttgctgttgactagtcatgttaggggaaggaggaatggtatagacataagattttaaaatattgacgtgcgtcgtgtgtttacttatttgcaatcttttttttttttttgagatggagtcttggtctgttgtctagggtggagtgcactggccgatctcggctcactgcaacctctgcctcccaggttcaagtgattctcctgcctcagcctcccaagtagctgggattacaggcgcctgccaccacacccagctaattgttgtatttttagtagagacggggtttaccatgttggccaggctggtctcgaactcctgacctcaggagatcagcccacctcagcctcccaaagtgctgggattataggcgtgagccactatgcccagccatttgcaaccatttttttaaattgttgtgttaagttactataaaaattaacatttttatagttttcccacattttactgcatactactttatatgactttatgattgttaggttcttaaacaatgaattttgacttaagttcttttatatttttatttttaccaatccatcctatttaaaataaattaatagtatgtttaatatctttcagaaaagttctttccctgtgctttaattttaaccagttttagctaatgtttttgcacaaccttttctaaaagcaacaaataattgattaaggggaatctgggctaagctgaagcttaactctgaaagctgtgttaatgagtttccataggaaaaactgtctactgcttttattttgtttatagattgaaattagctaaatgaaagaataagtaaatgagagctgcttaaattaagacatccattaaaattttttgtcttgattactttcccgtctcagagtcaattgatctggcttttggtactgagcacatgactctagacaagcatgcagtcattctaggcatactgctatttgaaaaaacagctttaaaaagatgttagaacctgggaaaaaatatcttgctctcttgtggtttcacaggatgccaaaggtttagttgcttgtatgtttcactcaattgctttctgttcaatgaataaaatcagcaccgtgcattagaactttgcagactcactgcaaaggaaatagcaggaggtaaagtgacctcaaatgaatgtggctttttttgtggggtgcggtgggtgggcagtgctacaacttaataaacaaattgagttttgcaggaagaaaacctttaacccatctttatactctctcatggtgacatttttcttctgctatcattcccattctttaaacatttttacaatgattagttcattttaaacatgtaacatagctacagttgagttgtttagttgttttataacgtatatgtttttcgagtccatcagtaaactggaattataatcttatttttgttgttttgatcacacaacttttctgcgctctgaaaaatacaactgatacttacttctcttcaccaaaagtcttttaggtaggtttatcaccttttatcagttgagtgagtaagatattttgaaaatattttacaggggaagtagcagaaattctccatcatgtatggtaaacttgcagttatctgtgctcttagaagacagagggaaccggccgggcgcggtggctcacgcctgtaatcccagcactttgggaggctgaggcgggtggatcatgaggtcaggagatcgagaccatcctggctaacaaggtgaaaccccgtctttactaaaaatacaaaaaattagccgggcgcggtggcgggcgcctgtagtcccagctactcgggaggctgaggcaggagaatggcgtgaacccgggaagtggagcttgcactgagccgagattgcgccactgcagtccgcagtccggcctgggcgacagagcgagactccgtctcaaaaaaaaaaaaaaaaaaaaaaaagacagagggaacctgaatagttaatataatttttattgtagtacaggttttactcacataccttgggaaaagcttcttttcctgcttggcattattgccaaatgtcaggattgacggaggtgtatggggagatggatttgagaaaatctggacatgttactccatgaatctagagaaagcaggggcaatacatttatttttgttttctgaaggtagctctcattgtaatgatgtaatttggggcacagaattgagccagactgctgggaatcaatttctgctccatgcttactagcctcgtgactgggcaagttacttaaagtctttcctcacctgtatgatggagacgataataagaccacctacttcatggactgtgaggtttcaatgaattaatatggtaaagcacttagtgcctgacacatagtaaatgatagctgtattgttgccaagtcagtaagtgtgagtcaaagtatacagatatgtttccctgaaggaatttgaagtttaatacttaagttttgtaaaagtctgatttatatttacttttcaatagtccaaagtggggactgaaagaatgtacaaaatgtccgtgtttgggttatctttcctaaacactctgccttcctcaggaaacatttcttctgtctcagctgttccactgccctgctgagctggaatgactacagcactgggagacacaggtagtgctgcacctggctgggctcaggagccttcctgtgagagaagggttttgcttttcttatcaggatggttaattgaataggtgccatctcatccctgggcactcaaggtttttttttttgtttgtttgtttgttttgagacagattctctctctgtcacccaggctggagtgcagtggcatggtctcagctcactgcaacctctgcctctcaggttcaagtgattatcctgcctcagcctcccaagtagctagtactacaggcatgcgcaactacgccctgctaatttttgtgcttttagtaggtagagatggggcttttccatgttggccagactggtcttgaacccctgacttcaggtgatccacccgctttggcctcccaaagtgctgggattacagatatgagccaccacgcccggctgcactcaagtattaaaagaagtgaacatccatataggatttattaggatagttactcatttgacaggtatttctctagggtttacacatagaaaagccttcaggattttgcgaagacagggtttccttttcctgtataaaggacagctttagtcctaacagtgaggggaaatatcatgaaaatgattcctttattcttcctgctccgtttgaaaatgacctgattctcttttagaaatgtggcttattttacagttgtcctcttcatacatttatttacttatttagagacattctctcactctgttgcccagactggagggcagtggtgcaatcgtagctcacctcagccttgcactcctgggctgaattgatcctccagccttggcttcctgacttgctgagattacaggtatgagccactgtgctcagctcccctttgtacatttagagtttgcaatgatttgttttgtagggaaagatcaagaggaaaaactagtaagttcattcatcatctgcttcttgttgatagaggctacgtttcttaaaagtaattacctttgaattttgtttcccaaataatttagtgaaatgtcaatatgaattcatcttgccttttaagattttattttattttgggatggagtttcgcttttgttgcccaggctggagtgcaatggcacggtcttggctcactacaacctctgccttccgggttcaagcgattctcctgcctcagcctcctgagtagctgagattacaggcacccaccaccacacctggctaatttttgtatttttagtaaagatggggtttcaccatgttggccaggctggtcttgaactcctgacctcaggtgatccacctgcctcagcctcccaaagtgctgggattacaggtgtgagccaccatgcccggcctaagattttattaatacagatattctgcatctttacaggtctgtcttgcattttgcaaacacgtctgttcttggtaaggtgtatacgttttgaattctcttcttccataacttggatgattgagaatctgtggaactccacccaacacctataagggtagcagtgttaaatggcagtacattaacatctatgcctccatagtacctttttctaaatttactcttaccacacagaaactatagtatctccttcattctaaggcacacattaaaaaatttcttattttaacacctctgtaattaggtgcattttctaattgatgtcatcctcctgtcaacaaaaggtggttatttgttctcttgtcttgcctcctacttgactataagtagactccttgaaggcaggaactgatagtcatttatttttgttatttccaatgtctcatttgcagtagaacccaaagtttggtgaattacaatgtaacaattttcgggatatcttaataagtgttagttgaaatgagagtttcattaggacactgtttttggattgttttgaaacagggtcttattttgtcacccaggctaagtgcagtggtgcgatcatagctcactgcagccttgacctcctgggcttaagcaatcctcctgcttcaacctcccaattagctaggactacagaggtgtaccaccgtgcctggctttatttatttatttagtaggtagagacagggtcttgctatgttgcctaggccagtcttgaactcctgggctcaagcaatcttcctgccttaacctccccaagttctgggattataggcatggattgctgtacctggcctcatcaggatacttttgcagggggagatgtaaaaactgtaaaaaggagggcctggaaaatgctaatatacatagttaaatgctattcctacttttccctcctttgtaccccttctgtctttctcttttggttgattctcttcagactgatgcatacctcaccaagaaagcattggttttagcagatgtgagtgaagtaaaaagactaagaattttatatttttatttatgacaggctattttttgagcatcttttggatattgcactgtgcgattgtcactttccattatgtaaatgaggaaacagtcaaatatgttcagagacgtaaaattttagtccaagatggtggaagaaggaccaaacttcctgttatgggtttctgatctgggctttctgctttaaaatctcttctgaactacgttttttttgtctttttattagtttaaaattaatgtttttaatagctctgtggttttgagactgaatttttacattcttatcacagtaaatgtttgcttaaaaaggtggagttgatctggtctccctttatcttgcctctgagtaccctaaaatgtggatttaattttagtgctagaaactgtttagtgggtctagttgttttccttaattaaatttaagcttttacatgtgggtgattagaaaagtcttatccagaacctcagttggcattttttagaaatgactgccatgtagtttttttttagtagactttaagaactttagagttacagaaaacctgagaagatagtataggaacttcccatatatctgtcacctagttcctctattgttaacacgtatggtacatttgttagaattaatgaaccaatgtggatacattattattagctaaagtctatactttattcaggtttccatagtttttacctaatgtcctttttctgatccaggatcccatcaagataacacattacatttagttgtcatgccttcttaggctcctcttggctgactttccttgtttttgatgacccaactattttgaagagtactcattaagtattttgtagagtgcccctctattagaatgtgtctagtgttcttctcatgacaggtgtagggttatgggttttgggttaggaagaccacagaggtgaagtaccgttttcatcacattatatcaagagtacatgctgtcagcgtgatttgtaactgttgatgctgaccctgatcatctggctgaggtaatgtttgtctggtttctctactatgaagttgctccctgccccaacccttttccatattgtattctttggaaggaagtccttatgtgcagctcacacttacggaatgaggatgctgtctaattttgaataaacatttaaatagtagaggcttagtttaaaaatttacctggagttagtgagacttttgctttttataacaaaaaccatggctatttaaatgaaatattaaaacatgtgcttgcatttggctgggcatggtggctcctgtaatcccagcactttgggaggctgaggcgggcggatcacttgaggccaagagtttgagaccagcctggccaacatggtgaaacctggtctactaaaaatacaaaaattagccaggcatagtggcgtgtgcctgtagtcccagctactctggaggctgaggcaggagaatcacttgaacctggaggcggaggttgcagtgagccgagatcgcaccactgcactccagcatgggcgacagagtgagactccatctcaacaaaacaaaaactacaaaaaaaccatgtgcctgcattcaaagatttggtttggcaataattttcaagctatttttcattctcagtatttcaacatttgctattacatggcagctgttagatgttcctctttattttatggcatctaattgataattattttttgaaaaaaatgtaatggaaatgtggaagaacattagtcaagagctcttgaataaaattcgttaatattttgttctgcatttattgcttttctgcacttcttatttctgcatatattatttctaaaattgaggatttggttgatatgtaaattatgattagagaccagaacagtttaggacccaaaatgatcaagggaaagcacctcgctggaaacccccatgacaataaaactctccttgtagttcccatttgtatgtttcaattataaggcttatgttaaaattagatcagaatttccatcatagactctcaatttcatagttgtgtaagtgccatataaacctaattgtaaacaaaggcatttaatgatggacattatttgaacaatttaagatcaggttatttagctcacaggctagaaaatacatgtctagtttcacattttaaagttgagagattgtgaagatgggctttggttctaaaggtgaattttatagttttttctaatgattttccagattttctacaatgaagatgtgttgttttataacataataaattaaaaatacttgctaaattcttttttctttactgattgctcttgagacttactgcattgtaaacaaatgactattttagatgtgtatattaatttcctaggtctgctgtaacaaaccacctcaaacttggtggtataaacaagggaaatttattttttcataggtcagaactccaaaatcaagttgttgtcgtgctggttgattctggagtctgaggaagaatcatttccatgcctctgtcctggcttctggtgcttatcagcagccctttgtgctccttggcttgcttgtggatgcatccctccaatctctgcctctgccttcatgtggccttcctctctgggttattttctgtgttttgcatctcaccctcctttctcttataaggacaacagtggttggatttaggtccagggccatctcactttaataactgtaaagaccctatttccaaatacggtcatattcataggtaccaggcattaggagttggatatatcttttttggatgccaccattcaggccactacagtgagcaagcctcttcctgcatttgcaaataagcactatgaaagtacttttactaaatgcaataatagctatagaatctgacctatattatatgcatataaatgtgattcagagttacatgtttactttcttttcatgtggtttacaattgatgtggcattcttttactatgaattaggctgagcacatacagacaagctataatttgtgtctctaaatggtgtgagcagggtcttaaattctgtgaacatgtgctgtttagctcttgactttttaaacctacgtacttgggtatttttataagataaatgtttatagttccttttgatatgaatcatgtttgtctccacataaaagtttaaaattatccctagcgacctagtctgatttaaatttgtgtgccataagatattttataaaaacagaattgctggtagaatgaggttaagtaatcaaaagtaagactggttgtccttggtgtgaatagacagccactttcagagaagtgctggcccggcctccaggcatgtggtttggagggaatctctggttgagaacatttgctgctgctgctttcccattttgagatgaacttgatgaggaatttagttcttcgtattattaggaaagtaaaacaacagtgatacaggtgtgagattgcttttttgaattttattgtgccatagacctatatgtcttcactaaaacatagctccacaagtgccagaactggctgggtgcagtggctcacacctgtaatcccaacactttgggagtcctaggtggtaggattacttgaggccaggagttgatgaccagcctggggaatatagtgagacctcatatctacaaaaaaatgaaaaaattagccaggcgtggtggcatgcacctacagtcccagctactcaggaggctgaggtgggaggagcacttgagcccaggagttcaagccagcagtaagccgtgatcgggccactgcacttcagtgcgggcaacagagcaagattgtctctaaaaataacaaaaaacaaacaaaaaacaagtgcctgaattatgctggttttattcttattcagaaccatatcctagcttgtaggtattaagtacacaacaactatttgtcaaatgaatagtatatcatagatgctcttgaaatctatgtggcatttcaagacgtgtcttattcttttcaatggctgtttgctatgctgtgatagatatgctgtaattcatgtaactagtccgtgttctccccttagggatatttaggctattaagagtttttcaggccgggcacagtggctcacacctgtaatcccagcactttggaaggccgaggtgggtggatcacttgaggtcaggagtttgagaccagcctggccaacatggggaaaccccatctctactaaaaatacaaaaattagccaggtgtggtggcaggtgcctgtaatcccagctactcagcaggctgaagcaggagaattgcttgaacctgggaggcggaggttgcagtgagccgagactgagccattgcactccagcctgggcaacagagtgagactctatctcaagaaaaaaaaaaaagtttttcacagtaacaaagctaccatgacatatcttgtttgtgtgtgtatgtttatgtaactttcgtagtttgcagtgttaatttccttcattcatggctatgttcttgtgaaacaagcacattttaaaatatattattgaaataattttccagtataactgacctatattttcttaaatacatttaaagtacttttatgttgccaggcgcagtggctcgtgcctgtaatcccaacactttgggaggctgaggtgggcggatcacccgagatcaggaattcaagaccagcctggccaacatggtgaaaccccgtctctactgaaaatacaaaaattagcttggcgtgttggcacgtgcctgtaatcccagctacttgggaggctgaggcaggaaaattgcttgaaccagggaggcagaggttgcagtgagccgagattgtgccactgcactccagcctgggctggagagactctgtctcaaaataaaataaagtacttttttattttatttttattttttaaagacagattctcgctctgttgcccaagctggagtgcagtggtctgatgatgatagctcactgtagcctgaaactgctgggctcaagtggtcctcctgcctcagcctccagagtagctggattataggtgtaccccaccacaccgggtcaatttttaggttatttttttataggtcttgctatgttgcctaggctggtctcaaactcctagcttcaagcgatcctctcaccttgacctcccaaagtgttggcattataggcatgagccactgcttctggcctaaaatgcttttaaatttgtttctcctcgaatcagtgaaaaatcctttgccacagagttttgaaaaaagtatcagaagcagtgtgtatgcacacactgttttgatttcctctgtgggatggttcttggctaatccctttgaaaggaagtatcagaacctgtctgtccattgcatgcaaggctgggaaggaaagcagtagccacacaataggttacaattagaacactgaataagaaacaaggaagaattccttccatgcctaagagagatgcataaccttagggtgaccatatgtctacttgcctaggaaagtcctggtttatgcctgttgtcctgatgtaattattattagcatcctctttgagtcccagtttatcagtaacttatatggtcaccctacttaatctttcagttctttttttccttatctgtagagagagagcagtgcctggtatatagtaaatgtcatgtaagtgcttgctgtcactgttattatgattacttgacctatcagcaacccttatctttcgctccttcttaaattattttcttctcttggcctcctggctaccattttctttgttctcttcctacttttagctgctccttctcagtttccttgcctagatctttctcattttcctgacctcccaacagtgaagtaccccaggtcccagtctctgttgttttctctgtctgattcgtcttgtgacaataccatctatctcctgactcccaaatttgtcttcagccccaccttctcagtgaatcccagactcatttctgtaggtgtctaataagtgtcttaacagaacatgtacaaaaccactctgtattcttcctccattctctaccccaccagcctgttgcagcccaataaatggtaccaccattcttacagttaattaggcagaaaaacttggcatcatctttgagtcttttctgacagactctgtatctacatccagtttatctgcaaatgctgttggccctcctttggaagtaaacacggatctggccactttacacctccattccagtcacctcccttcaagctgcaattttcttttcatgatttattgtaatagcttcttaagtagtctctgatttcacccttgacctataatccagtcttctgactgcagccagtattacttttcatatgaaagtcagaacattttattcatctgcctcagaccctctagtggttttcatttcactttgaataaaatctgaagtcctcactctggcctgcaagtctccgcctgcctccctgttaattttctgaactcattaaccactctctcatgtttgttgttgtagctacactggctgtcttgctgttcttcagacatgttacagtactctcaccgcactgcctttaacttaatgttccctctgcctggaatgatactctagatcacagcatggctcactccttcagttgatccaggattcccttctccagtgtcacattgtgcgtggagccttctctggctatcttatgcagtatcatatcctcccctccaactcctgctgttgccagcccccttcatttttcttcagagttcctatcacctctgatgtattatgtttgcttatttattgatggtcaatacttcaagaaactgccagccctctaagagcctggggattagatcctcagctcctgacacaatgcttggcacattataggtgttcagttagtatttgtagattaagtggggtggtgagtgagcctagggaagattcttgtggcagttttagcagtttagtaatagaacatgtgctgtggaaatcaccccctttaattctagttttgcttctacagaccattctctgttctagaagaggtgagaaatgaaattggggtttaggatattggtaggtaacgggatagaggggagaggaagtgaaaatggaagtaacagtctagactctgggaagcaaaagttacaactagaagtgagttggttacctacctgtttatggggcacccttccatttctaagtttggaaaggaaaagagccaatttttgaatactcagttttagttaagcagtgtactgagtacttaacaatatcatttaatcttcacaatagccctttcaagtaagaatcattatgatcatcttttaggtgaggaaattgagacttaagagattaaataactttcccaagatgatacagcaattaagcggggtatgtaggtctgactgcctctaaaatacatgctctttacttcatagcacctgaagggggagtctgtgtgcagtagttcacatttcatgtggagctgtaaagtacagaaaatgttcacgttttactccttgtaaaaaactcttgaaagtgtctctcagctttgcaagtaattaaatttggtgtcagtgaggagtgacttactgcaaatcctacagctataaagtagcagaggtagggcttcaagcaaatcttcctcttttaaaatatgatattttgctgtattccacaaatttaaaacaaggaagtcctcgatagcacctataaattatatttggcatattgtaggagctaaacgtgtcataataaaattatatagctggaaagagtcttaaagaggtcatgaagggcaaacccctcatttataggtgagagccaggaaagaggtttaagagatttactcatctaggagcactgagctagttgtttgtatagctgggactagaatctagcttttattactaaagagtttatgtttaatctgtctaggtctttcgaaactcttgggttccttctttcattcatgtatttcaaatttgaaagctacaagaattgttttccttccatccatatctcctagcaacccagttaaacccacaggtaaagttaatcagtttcttgtgtatctttccagagatattttgtgcacataaagcaaatacataaactgtgggtatttaacaacatatcttgcagattgctgtatattaatgcatgaagtcattcctttttttaatggttatattcatattgaatgaacctttcgtaatttaaccaggcatttgctgaatgacattgtccttgctgaagcacattgtgtttccagtcttttaaagacatttcactatgaacaaccttgtacatatcatttcttatatgtgcagacctatcggcaggataagtttctggaattgaaattgctgggtcaaacagtatctttgtgtatttaaaaaaaaatgacctacttacacctttactcgtaacttacaaatggggcgtttccatttttaatgaaacgactttacttttctatttggcagtagcagtttataatttaaaaaaataatgaatcacttattttaaggggtaccaggatttttttttttaaactgtcgcaggctatgtgctatgttagtatggcaggttaaagaaagtataatggaaggagtattgcattggagttagacctgattggaatcccagttccactttgtgacctttggcaggttatttaactgctgagcctcaatggtctcatctgtaaaatggtgggcgctgttatcccagcttctcgggaggctgaggcaggagaatcacttgaaccagggagagacggaggttgcattgagccgagattgcaccactgctctccagcctgggcgacaaaatgagatattctgtctcaaaaactagccttaccaatacggttgtcttgaactattgtatttcatcacatttccccccgtacattttagtatatctgaaattgagatgcttcatagtcaaaggcatgtcatgagtgtattggtagcagtttttttttccctcttcctttttctgctttttttttgttgttgttgttttttgtttttttttgttttttttggtttgggggagggggcagggtctcctctgttacccaggctggagtgcagtggcacaaccactgctcactgcagccttgacttcccgagctcccatgatcctcccacttcaacttcccacatagctaggaccacaggcatgtgccatcatgccctgctaatttttgtattttgggtagacactgggtttcaccatgtttcccaggctggtcttgaactcctgacctcaagtgatccacccaccttggccttccaaagtactaggattataagcgtgagccactgcgcccggccttttttttttttttttatcttggcacataaaataatgatggtcttacaatcagtgtcatcttagatttgatgaaaaagggtaaattcacatactgggacaagtgaactatgctagggcatggtataggctgaagctcagtgtgataggaaaagctcagggtagggaatggggtgttagagggatagttacagtgagggaagtttcattctagatcagcagtcagcccagtagaacagccacctagtgggaggctagtacaactgattgatggctcaggagcaggtattgcccaaaatcctgggtatgtggaattggaattgtggagagttgttggtgggtaataagacttcgccccacagttgagatttaggaactatgtactcacttatggcaggaaggctttataagaagggggctatgagagaaaatatttgcaaatcatctgggcacagtgatgcatgcctgtagtcccagctactcaggaggctgagatggcaggatcccttaagcctagagttcgacaccagcctggacaacatagtgggatcacatctctataaatgaaggaatgaatgaaaaccattgaaaaaatatttgtaaatcatatttctgataagggatttatatccagaatatagtactcttacattcaatgataagataaaatttaataaggggcaacgatttgagtagccatttctgcaaagaagatatacaaatggccaataagcacacaaaaaggtactcaacatcccactagggaaatgcacattaaaactgcagtgagagactattttacatccgtagggtgtctgttgtaaaaaaaaaaaattctttttttgttggggtgggggcggcggtgggggataggatctcagtctgtagcccaggttggaatgcagtggtgcggtcgcagctcactgcagcctctaactcctgggctcaagtgatcctcctacctcagcctctcacatagctgggactacagttacgcaccaccacatctgactaatttttaaatattttgtagagatgggggtctcactgtgttgcccagctggtctcgaattcctgggctcaagtgatcctcttgccttagccttccaaagtattgggattacaggtgtgagccatcgcgcacggccaagactgagtttaataacaggtctaggtgaggatattgaaaaattggaacccccaaacactgctagtgggaatgtgtctgtgggttttaatttgggaattcaaggaatatctcttgagggttttaatttgaggacagtgggaagagagatacagtgtttttgtacttagaatgttttcagaagaaggctaaacccagggaaagctattggagtggggagttaggtcaggctgagaaggctggggtatacaagtggtaccccaaagacaagctttccctctatacaagttttgtttaggcctggctctgtcctctggaaaaggaaaagaaattctcttcccatttcttcttaggaaaaattaccgtgctttggaggttggaacttggggctgatactggcagggccatatccagtagtagcttttgtggtttggcctccgaatatacctgcaatttaggaaaaaactccaaataacttataaacagacttttgtcatagaaccagtttgtaagctgactttgtactgtactttctgctggcacataccaggcccattcatttgcaactaaatactatatgtgaggtaatacatatatattagctgaaaatgtatggaaggcaaatgaaggcacatggttgctttaggcagtctgagacaactggcaacactgaagacctcactaaattttgttaaaaaggaactaaaaggattactggatttagtgtagcttttattattctgcattagagttctggggattaaattatagacatatataattgtacatgttagattaaatgaaatactaatttcagtcaaaagctatacttcagtgaaggaatatcaagcatattggaaacatttgacaaaaaaaataagggaggatgttgcagggaacaaaggttctctgtgacatgacagctgctgctaaaaagtgacacaaggaggagcccagctctggctcacagctgcctgaagttgctgcagtcttctctagtgttaccagaggaatttgctctgctcttgttttagaaaatggaggctaccaatggctaactaggtccttattgtgcttggggaaattaattcttctttccccactgcagtcctcccctactttgagatctgtgtgcaagtatattacttagcttcaggaaagttttaaaaaccttgagcatgtaaatcgagttttatatgtcctgggacatacatataacacaattttaactggaactctaattcattttagcttcttttgaaacccaaaagacagaataaaacagtaggtgccaagttatcctcatattccaagaacttgcatagtgggtagccttaaactggttttgcacatgtagcccatacctacctctagggaataaaagtgttgagattattaagggttctaagacaatgtttttggaaagagctattagtatgttgtatgtttggtgtcctttcctgcttccacacgtagtggaggagaggagaaagatgcttctccttaagcccctttcatttaagccaaatgatgagggaggctccaatggagtcattctgagaatttgacatgtatcccctcgagtttggggaatgaaaggtttagtatacaaatctatggatcagtagccctgaggcagcagagcacagagagggctgtatgttagcactttgtacttagaaagacgttagtgtttcctcaggctgctgggtgaaaccagcttaaagccatctagaaagggacactgtgctcggccacctagaaggtgacatgaaccaggaggaaggtacccatggaaaccccagaggtggagggttggagttgtaaatggccaggtctcacttaagttctgggaattgagtatggagggccctcatgaaaaagttggtatgaacatcacacttaattggtgtggccttttgacacccccatagcttttcccactgcttcagttcccactctgaaggagccagagacagccttgttgtgggtagaagagatgcagagcagggagagagagatgatgacaggacccctcacatcccccagcccaactagacttctcagctccaccaaggaaggggagaagctttaatttagatgagtattgattactgcagttaagacagttattgaaactatggtgttcttggggctgaaggatatttaaacttttttcccccctttttgtggagatgggggtctctctctgtcgctgaggccggtctcaaactcctgggctcaagcagtcctcctgcctctgcctcccaaagggctgggattacaggcatgaactgttgtgtttggcctaaatatatttatagtcaaagaatgattttaaaaaattatgagacttgccttagatttcattcaggaacaaggaaaaactttcccacagaggggcttggagggaaagttttatgcttatacccattgagtttaactcagtatatcagttattcatacattcacttagacacatacatgaaaggataagcaattgtaaaaggaaattgtaagtagcaattatatagtatacattaagcttggtatatgtattttccaaatcacaacttattactaataagacagaagttgagaaaaatccaaactgttgtcactttaagggtaagagaatattgagattgttttctggttggagtgttgaaagcattgcaaagaaagcaagatgtgatttgggctttatcagctataatttattaagggcctactgtgtgtcatctgttgggctttgtactctacatagacatagagtatttttaacttttcacaacaatcctgcaaagttggtgtgattttcatttcatagacaaggaaactgaggttcaaacaggttaagtgagctactctagtttcccacagctggcaaactgatagaactgtgtccgggtctatttgacttacatctcagactccctcaattctgctgcctccctaggcagccccacacaccagagatacagtggtgggactagggacaggatggcttcagccagcgcttctgtcctggaagaggagagtggaggctacataacagtcactggggacctgtggcccttattagatcccgaggggcaactttgtgagcttccccctactccctgggagtgggagcagctccctgggaagcttttccttttctcttacaacttctttgctgccacatctgaagtgggcattggaatatgccttccctaaactagctgttcttgcccttttctgttgaggaaatggagttagagatgtgttagtttacccaaggactcaaacagctagcaagtaggatggcttctggatttggatttcaggctctccgactccagagcccttgtgttttcttctcatcatgttgtctccagtaaagatataaatgcatctattaataggaagcaagttaatgaaatctcattttggtttatcataatttaaaaaacatagtacgtgttttatggatagaagtaataatagggaaatgctgtcttaaactggaagggagcagagaatcacagaattttgcttctagaatgtttcatgacctgatatctgtgtgtagtgtgggggtaaggggtgagctgagcaggagctcaagaaggagaagaaaagaaagaaaatttgttagtcttggtttttggtgtgtgtgtgtgtgtgtgtgtgtgtgtgtgtgtgtgtatgtgtgtggtacatttactccttgttttataggccaataagggaatgagaaatttgaaattttatgaattttatttatttattttaatttttgaaagagtctcgctctgttgcccaggctggagtgcagtggcatgatcttggcttactgcaacctctgccacctgggttcaagcgattctcctgcctttcttagcctcctgaatagctgggactacaggtgcccgctatcacgcccagctaatttttatatttttagtagacacggggtttcaccatgttggccaggctggtctcgaactcctgacctcaggtgatccacttgcctcggcctcccaaagtgctgggattataggcctgagccaccatgcctggcctatggatatgtcactttcgatgggatcagtggaagcaggaatggaagatgagtgtgagtgtgttttactttcagagaggcagattagcaaagttatttgatgtttaagcactaagcaggtcactttacttctctgacaaagtccctgccctcatggagttcctttctagttcggtcggggaagaaatggacaataaaagtaaaaaataaaagacgaagtagataagatatatgtggtgttgagagaaaaggaggaagggagaaaagagggagggggaaaagagaaaaaaacctggaaaatattctgagcaagaaaaaacatcagccttctacatgatgtgtagtcttgagtagaatgaggtgaaagctcagggttaaaaaaggatcactgtctctttccttatgtgctaccaccagatttagaaaaaattaattttaatatgaaaactgtcaaatatatacaaaagtccagagaacctacaaccatatacacgttgcccagattcagtatttttcagggttttcctacacttgtttattgtttccgttctctcctttccttttcccttcccctttctataccctatggttttagagaactcctacgactttcctgagaatgatgctgtgctcagaactgccctccatttgtttacaactccccagtggtaccttagagctagcctatcctttttctatgcaagggtggtagacttaaccagtgtgctggattcactgagtttcctagaatttccagtaaattaccagtcccagggtgtagaccaggcaccactctgtggcagtgtttgggaactacactttcaccaatagcttggtgtcagaagaaagtgtgttgtcactccttaccactgaaggcggaagggcaactcacccctttttctctccttccttcttcttttcctccttaacgtggcttctttgaatggggagatactgagttggcagttctccttaggaggccagcccgagctcctgttatgcaatctagtggcatgtaagcaggattatcctgcttatcccagcataatattatactttggcattattaggggcttctgacaaacttacccagatcaattttttttgaggcgggggtggaaacagggtcttgctttgttgctcaggctggagtgcagtggtgccatcatggctcactgcaacctcatctttctgggctcaagcaatcccctgacctcagtctcctgcctcagcctcctgagtagctgggactataggcgcgtgccaccatgcctggctaatttattttttgtagagatgggggttgcccaggcttgccagacccgattttatctctgtctgaatgtgatagcttccctaatcctaaatgtttctccacatctcctgacaatgttaaagaaactgaagttcatttgcccatccatactaccgggaaggcatgctgccctttgaatgggagggtattccttgtcttttgactaggattcttctgcacacatcctttcatgtctatcaggaaacatgtgctctctccatcctccacccttcctttcccctcagtgtactcttttgagcccttgggtccacccttcttccctatccttgcctgaacctttactgtctagctcagtgcaatactgtgcttgcttttttttcctctttttttctctttctgctacagaacatcctttctgggctgtggttggtaactttttataatttcaggagagagactgttttcttttctggcaaattgctgaggctgtgttgataagtgaacgcatacatagttctgtacataactgtagtattaactgtctaacttctcttgccttctgaacaagcatggtattggcacttcatgctgtttgttttttggcttgggtatagacttaaaatgccccaatccttctcttgcccccagtaatacctcaactactggtggttgtataaaaggcactggactctgaagatagagaccttgtctttatggagtatctttatggagtacttagtaggtgcttcatacatgatcactgaacaaatgagtgagtgaaatcaagagagcaaggacaattggctgaagggtttcaagtagtgggaatgaggctttgcatggtgaacaacacagatcaaactggatggctttgcatactacataaaacctggagggctttgcatagcatgtaaagaaactatggaatcctgtaagcagcagggagccatttaatttatatgttctctagaggtataattcatatatgtacaaaaaagtgtacagatcttaagtgtacagcctgatgggtttttacttatgtaaattaactgtgtagttgctgctcagatccagagactatttccagaaccccagcttttgtcttgattcacaacgtttggataccaaatcccagaggtcgtgtggttggtctgaagtgtaactaggactggaattattacagctactcctgagcttagcaaatctttatacttgagtaaaaaacactaattcagaccatttaactgcatgacaaaaacaatagttattattatggttgacatttattaatcagcatgccttggcacttcatatgcattatttcattttacctgcttcacaggattttgttcctgtctctgttttacagatgctgaagattagacatgtaaagtgatttgccttaggtcccacagctagggaatagcagagttagaattaaacccacgacacttcatcacggggactgattacttattggtgatctgttgcctcaaatatctggtacccaagtttaacaaaaatgttgcctttttggtgagaggtgatgcctgtatttgttacctgcacacagtgaatgctcttagggatattctgacctatggattcttagaattttgagagggaaagaggtttttgattctatgataggcagttcccagagtgatgtttcgttggaggaggattgtttcaatgtggatggctctttacaatttacgtgtagccagtagatgatggtctctgtagacaaagtatgaagataggacacagcaaagattgggtgtgaacctaaatatccaaaaatcccaacaatgaatttgtcttaaaaattaatatgagtggaaataaatgcatgtagcagtatggcaaaattcttgtaatactaagattgtgtttcaagagttaagacatccaaagaaatgtccatagcgagtagaggtaaaacagtttattatactggacttcaaagttgcaacaatcttttatataacaatcaaaccaacaatcttttgtgcatgttaatatcttaatctcacaacgccaagaactgtcacatttaaagaattctagctattgtgcatggcttggcatttgtaaaaaatgtatttaacatttgtttattatattttaggccaaatcagtagggacagtgtagcacttttaggcatcagctgggagtagtcagtgaaattcaggttttacaagatataaaagcatggcatatggggaaacatgtttcaagaaatgaatcttaaaaagtacagcgcatgctttatccaatttgcttgtgaaagactgctgattcctgttgtttaaaatagtgggtgtagagaatattgttgccagtaaaatttatttactttttgaagtggcatgggtgccaaaaagtaagttcatgattgttttgatacctgctttttttttttttttaaggctagttaagtgaattgatacctgtttatttttaaatggtgatggagtggtggaggagatggcttcctactaaaagttactgctgttggtgaacatttcttttacagactttgttcaatacatcatgcattgaagtgaaacatcaaaaaacaaataggattatagatatggaattctgtgattaaagttaaacattttaattttaatttaaaaaaaatttttttaagagacagggtgttattctgtcttccaggctggagcgcagtgtggcatgatcatacctcactgtaacctcgaactcctgggctcaagcagttcttctgtctcagcctccggagtaactaggactacaggtgtacaccaccacatctggctaagtcttaaatttttcgtggagatgcggtctcaccttgttgcccaggctagtctggaactcctgggctcaagtaattttcacaaagtgttaggattacaggcatgagccaccatgcctggctttaaagttattcttaagacttaaataaaatgtggaaagtgtccttcaaaaaaaatatgtaaagtcatggtatcaggcagattaatatatctcctcccaaaaccaggggattcttttctgtcctcttcaagagtgcttgtttctgagtagctctctggtgtttgcataggtcgccacgaatgttgggtcccaagagccaggaacccttgcctgaagaaggctaaatactcttgatgctggttcctagcattaagctgtctccttccaaatcattccttcagattttgtaatgagccagtgggaaaatgggctttgaggaagtcagtccaaagtagatcaaaggagatactcagaacaaatggaggatgatgttggtgtcctggttagtgcccttctgtaagaagagggaaatgcactctctcagattattgttgttatcttttttaaacctttttcttttttggagacagggtctcatcctgtcaccaaggctagagtgcagagtggtatgatcatggctcactgcagccttgaccttctgggctcaggtgatcctttcacctcagcctcctgagtagctgattttttaaaacccttttaaataaaactgaaatgtaggctgagattcttcccttcttacttggatactttaactgtccccccccttttttttatggtaatgacttcggtagttgggagggtttgatcagagaagagaggaatagaatttaagataaaaaaacaacaaaagatgtcagtgaaagagtaagtttgaggttcctactaatgaaaaaatttcaaaatgatattttcttgtagtacataaggcagttgaaaggggaataagacaaagtgtgagaaaagaaaggtataagatgaaatgttccaggcctctttgtgttgtctccattttttccagatacttgacttcttaggactgatgattataatcaggttgctaattcaaataggtctgaattataacttactgtgttttctaatttttctagagtttgagatctagattcttaaccttaaataattatgaaaaaagttgtagatcttttacagtcttgcatatttcagatatgaaaatttagagatacctagtaccttttcttcacgtgaaggtgctcataagaacatttggtggggaattgtcatagagggtaaaccctagtacagtgaaaatgttttgattagttctggataagtggaatttgttaagcaaagttacattggtacattggtaggcaggtaatcataaattttattttattttttattctatttattttatttatttttatttttgagacagggtcttgtcctgtctcccaggctggagtacagtggcacaatcatggttcattgcagccccaaccacctgggctcaagtgatcctcccacatcagcctcccaagtaacagagaccacaggtacacaccacgtcggctaattttttaattttttaatttttttttaagagataagagtcttgctgtgttgcccaggctggtctcaaactcctggcctcaagtgatccttctccctcggcctcccagagcataggattacaggtgtgagctaccatgcctggccatgaattttaaaataaagttttttcttttcttgcagtcctattttgtaacggattatgatccaaccattgaagattcttacacaaagcagtgtgtgatagatgacagagcagcccggctagatagtaagtaaacttcctttgtttgataatttgcatatcatattttttaaaaaagtaagcgctgatgttttgctatgttaaataatatatttgaaatattagatgatctggaatattagcccatgtcatttataagttttgattgaagagtctgcataatgggtaatttaaatattcctcaataaatgaaaagtaaaacgatatttgtattgatcttgttctagtgaaactggtctcattgcagtttgttgaagttgattttattgggacaactggaaaaaacctgtcaggtctcaactcttcctaccttttggcaaaggttaaaatggatgaagtgaatatagaaaaagtttgatactgttacttagaatttatagcacagagactttagcaagtactgttttgtgtctaaacatcccccctctccacaaagaaagctctattcttctaatatgtatgattcttttatttacagagatcaaaagttacattagcacctgcactaagtatggtattgggggatagtggttataactcagatttctttcttgaatttacaggtatctttttcagttttttccatggaggggataaaacattcaagtgattttagaggtcacctgactccatctgattaaatgtgtttgatatttttaagcttctaattagtgtgctaatatattctaaccacaaagtcaacccatactgatgaagataaactctgtaactgtctgccattagaatatatttgcctttagtattaagaataaagtactaagaaaggaatgccatttctgtattataccaagtatgaggctctctagaggactcacattaattggtcttgcccttgtggggaagcagtttataaaaaacaagtataattacatttgttgttttttctttagttttggatacagcaggacaagaagagtttggagccatgagagaacagtatatgaggactggcgaaggcttcctgttggtcttttcagtcacagatagaggcaggtttgtaccatattagaatgtagatccactgttcttgtcaagatcactagactttattgagtttggactttttgtttttatagaaaaaggaaaaataaagtactaattggggcatgagacttgctgaattctgatacttgaccaaattgattaatttgtttttgattttttttttttaagttttgaagaaatctataagtttcaaagacagattctcagagtaaaggatcgtgatgagttcccaatgattttaattggtaataaagcagatctggatcatcaaagacaggtgagaaggaatttcactgttgggaaaccaattgtttataatcatgtgagtgaactgatagatttaaggaaataattgaaagtctagtaaaaaaaaaatacggtgctccatgccacttaagtgtttatagctgagtctggcacactgtatttacagaagtcacagcgggtgaaaaataaaaaggaagtagatttggggaaattaaaattccttattttcaaatagtttttcataaaattttataagactttataagcctgcaagtgtttaaactagctttattcgcatgtaataatttcttggattacatccaaaactctaacttagttggataatttcaaagttaccactaaaggcctaagttattcggtgttaatactaaattaacttcatgtagagaatggctttcatttaaattgcagtatttggatttttttctaagtcactttaatgactgaattttctgttaattctttacattggctagctctaacacttcagtaacatttaataaaataatatttttagtatttagtttgcaggctaatttattctcacttgtttctttacccacttactgaaattttattagttaaaacaattttttggtaacattgcacattcatcttttttgtaggggaggggaacaaggtcagttgtatattaatgccggctgttcatttgtattagtccattctcatgctgctaaaaggacatacccaagactgggtaatttataaagaaaaagaggtttaatggactcacagtttcacatggctggggagacttcacagtcatggcggaaggcgaaggaggagcaaagacacgtcttacatgacggcaggcaagagagagtgtgcagggaaaccgccctttataaaaccatcagatctccgagaacaggatgggggaaaccgcggatgattcaattatgtccacctggtccctcccatgacacgtgggggttatgggaactgcagttaaaaaagatgagatttggatgggaacacagccaaacaatatcaatgttatatggctttttttaaaggtcttttgtctctaccccacatctgaaatgtattgtttaaattgtttattttgctggtatttaagtattcttgtttttatattatgttgtgtttacagattcttaggattttgttggaaaagtgtaaacatcaggaaaaattggttgataaacagctttgagggcagctttctattttgtaactgtctctgattttagctgtgtacataaaattttattggcggcatacccaatttcaaacactgacttaagagaaaatgatatatatatatatatatatatatatatatatatatatttgttttgttttgttttgagacggagtctcgttctgtcgcccaggctggagtgcagtggcgtgatcttggctcactgcaagctctgcctcccgggttcacgccattctcctgcctcagcctcccaagtagcttgggactacaggcgcctgccagcatgcccggctaattttttatatttttagtagatacggggtttcaccatgttagccaggatggtctcgatctcctgaacttgtgatccacccacctcggcctcccaaagtgctgggattacaggcatgagccacaatgcctggcccaagaaaatgatatattatcttaatgctaagatttggaaatgtccactgatgaaacttggtatagaataaattttcctgctaaatctcgttcaaatctggttataaagttagagtgaaaaaatttgttcttcatttcaaatcaatataaactgtttgaaataattaagaatatggcattgcttacattataaacctagcatagacagttcatctattttttttagatttaattttgtttttttttaagaccatttccttgaggtttctaaacctgattatatttattgatgttgcccagtggaccctgcctgtggctcttctcagttctttctagtactagaaactctatatgtcattgcatctgggaaataatggcaaagtagatgtgcattgaaggagttctcttcctatctctcgctgacttttgcctcacccctatatgcttcctgtcctgaatatagaaataggatctttctcaaaccttctcatggtggtagctccagtaaaggaataggtaggagacctaggataggtggagatctcctgtagggtaggcagtggcagattagggaagggaggagggtgtatgcccactagaaccccaaagaggctctgccattatcagcttgggtctatatgagttatttttaagttgtctatacaccagattgaggatccctagcccaaaaatctgaaatctgaaatgctccaaaatctgaaactttttgagagccaacatgattccacaagtggaaaatttcacacctgatgtcatgtgatgtcacagtgaaagctttgtttcatgcacaaaattacttaaaatattgtataaaattatctttaggctatgtgtgtaaagtgtatataaaaagtaaattttgtgtttaggcttgggtcccattcccaagaaacatcattatgtatatgcaaatacagtattctaaaatcaaaaaaattccaaaatcccaaacacttctggtcccatgcattttggataaggggtattcaacctgtactgaagattgccagaatgtggtatgcagtttccatctgtctgcagacagtcaacatattgaggcactggctttgtttgtatatcattggattataattattttcgtggaagtatttttttttactttttgtaaaagtaatagattctcagggtgaaaagtgagagaacaatataggaaatgatttccttatttcagtcaccctaaagatacgtagtgttagcttgcagtaagttatttttatttatttttccatctaaaccatataaatagacataaattatgtatatcttgaaaagcttagatgtatatatatccaagggagaaaagcaagtgcctgaaatctgattgcttagttttctgctcatttatatggcgtctactctctgaaggatagacacaaagaaaagttttattcctccttatgctttttcttcctttgcacctgtactcaggcatgttgactactctcacttttaaagtcatgaccactaatctttatgggcctttagtgctgactgggaatcctacatttccctagtccacctatttcccatttgtttggataatttttacatactttctcattttcttcaacctgtaacactttcttctctttcctcactctcagctgataatgtgtatgttttcctgtttctgtgagaaatttctacatgtccttacctccatatctactaacatgagtgcacaggtaccccatcaagttcacttccctccacttacatggataaactgttcatctgtctatgatcaacttctccaccagacactggatcctgttccttctcaccaactcatggacattaccccagcaattgttctatttcagatgaacatttctgcatgatcattcccatcagcatacaacatgctacaatgtctcttatctttaaaacaaaaaaactacagcataaacttttaatctcacattcccctctgagtatattttttctgcccctctttaatagcaaaactcctgaaacttactttctctactttttctcctgccgttcttgattctacagacatcaggcattcagtgccactgtcagtatcactaattggacaaatgtcagtgacatttgacatggttgatcacttcctttttgaagcacattctttacttagctctgagatagtatttcctgctcctccagcctccccagtgtcctttgttggtactactttgtctccgtgtctctctaaagtgtcttgggctctggatgtgcaaagacaaacatgccttatctcccacccttagggggcatgctattgaaattgagatactatagcatgaaattgagatgctatagtagaggtttttaccttttttttcccccctgaaacgggtcttgctttgtctcccaggctggagtgcaatggcacgatctccgctcactgcaacatccacctcccgggttcaagcgattctcctgcctcagcctcctgagtagctgggcttacaggcatgggccaccatgcccagctaattttttatatttttagtagagatagggtttcaccatgttggccaggctggtctcaaactcctgatcttgtgatctgccgccttggcctcccaaagtgatgggattacaggtgtgagcctctgcgcccagccggtttttacctttttaacatctcttcacaattaaaggtgtccgtctataatgtcttgacacacttacgttgttctaccaagtcaacttggacaggccacggggatgctgtaaaagcttctttccgcctgttcagagatgtttagttttttgtcatctgtaggttctgagtaaccagtctggcttgctctctgttgccgacacagcttgtttttttctacctttgtcttagacttgatcatttgtagtttctttaccttctagcctattttcttgtagataataaatgccatttctccttgttctttgaatttgtgggtcagcactggccatttctaccactggctcctgagattctgaaccccaccagggttcagggatatcatccagaagaggctttgcttgcttgcttatggcctctgtatctgtggactgggttgcttctttcatccttccatccattcatccagtatttattgaacaccttttctaggcagtgatgatgcagcagtagacagaatagtcactgaggtttacgtgagataaaaagatatctgtagaatttgagtggttgtttagtattaccagccatctggtcccttaagatatgccagtcattttgtttattctgctaaaggtgtaggaagaaaacataggtaaatgatttgcttaactttgctaaaatatgaaagtaggtaaatataacaacacttgaatctgaaattaaatagcacagtatgttggcttagacagtggaatttcatgatatatctgatttcaagttccttgtcctcaactcagccctgtctagagatcaactgtctttgcttttttgtctttaccatctttctcctggcttaccttggttgttccctctttttcccctccttttagttgcttaattattaatcgttactattaatttgagaaaataacttattatacttaaaataatagatagctaagtatatcaatccagactcccatctgtcagtacttttgaccagtgtgccccctacagcctcctaggaaaaagaacccctcctcaaatagtagaggatcttaccacatgtggcgttatctgtgccttatgtgcgtctaaaagggtttagatggtgaatgtaggtgtaggtactatgagggtttctcggttttgacaggtcaattttgttcaggctttatcgttagcatatagaacagaggtatgcactaaataagtatttgttgggtggatgaatctgggtgccagtgagttaagacgttgtattaatgtgatgattctttttacataatagatgtttgtgaaaacaagttttgcttctgtaaacttcattaacttgacataactctgagcactgaaatgtagtttattctatttggaaatatgtagtactagatgagctcatacatgttattgtgaactgctgctgctacctgtgtttttgaactgagtcttactggaagcttccaaatgtagttctgtgaatttgttgcatcagatttgccctggttatttaaaacaaaacatgtctgggaagtgctaaaatctaccaaatcagaatatccaggagatgaggcttaatattatttggtatctttatgaaattatctgggttgaggaacctctaggaagtacttacttttgtaactttcagttttcttttgatttctaacttccacagtgctatggctctgttccggtatgttgtcctttttgtcttttattgtttgctttggtgatggcaatgctatttctacttagttaaaagtatgctgtgtcagctcacaagcatgtggttagagatttcttcaccagaaatgtatgtataaatttgttggctttgtttcctggaagacagtgatgtgaaaccatgctttaaaaacaaataaatggctgggcatggtggcaaacacctgtgatcccagcactttgggaggccaaggcaggcagatcccttgagcccagaagttcaagaccagcctggacaacgtggcaggaccctgcctctactaaaaataaaaaaaaattaggcatggtggcacgtgcctgtagtcccaactactcaagaggctgatgtgggaaggtcacctgagactgggaggttgagtcttcagtgagctgtggccatgccactgcactccaacctgggtgacagagtgagaccctgtcccaaaacctaactaaacaaaacaaaaacaagtgaagcacataaccctagcagcaggattgttttatcatgtagaccatgaattaattaacatttcgtttttttcttcttctttttttttttttttttttgagacagagtcttgctctgtcaaccaggctagagtacagtggcgcaatcttggctcagtgcaacctccacctcccgggttcaagcaattctcctgcctcagcctcccgagtagctgggattacaggcccgtgccatcacacccggctactttttgtatttttaggagagatagggtttcaccatgttggccaggcgtgtcttgagctcccgaccttaggtgatccacccacctcggcctcccaaagtgtttggattacaggcatgagccaccatgcctggcctaactttttttaccctatataaggataggtgagttgctattcctgtttatgtgaattacattatgcatgatgggtaggacaaggtatctttttgaggaataatggagcaggaaaactactggaaaaattctaataagtacgtgtatttccttcccccaatcatatttaccccaacaaagtaagtagtttattgagatttcttttactttttgtgtatatatatatattttaacttaagaatgtacctatttggttagttgtacaccatttacttaacatgtgtttacttttttagctgctaagcatgcttctaagctttggatgtacaaagacaaacctgtcttaacttcctagcctcagaggacatgatgacgtggtgaaagaataagaaaacacaacgaaaaattttactgtggtattgttagagacttgtcagtggtaaccagatggtgtgatgggagctctgagaaggtgcttccaaaacagcaccaacacttagggggaagtttcattgctcagggcttgaaaggttagtgaggaagaatttgagagtgtagagttgagagagaagggatgacatcccaggaagaagaaacagaatttgtgacggcataggggtattttatatgaaggaatttcacatgtcaaattttcctaaaacagaaattgtcctgtctaaaattggtggttctgtgaagctttctgtgtttactcggcttccttccttatcgttaattgttcgggtaacttgatcagtttatatttcaaatgcatagccttgtggcacatacgttattttgaagagagacaaggtaaatttaaaagttagataaacttagatataccagtgctatgtagaacctgcccgttatcctgttggaatgccacagggcacaaacagttatgaagtagttgttggatatatgtatattggtgtactaaactaatgatactgtattgaggctgctaaatttttggaatagaatattaaactgggagaacaaattacctaaaacgtttagaaggaacaataccttgagctcaaacagggctaggaataattcatattctaatcaatcaaagtagaaaaccttatatttcttggagtattggatagtataactcagaagggttttgtcccagtagtggggcaaaattagccacactaaatgctgttctggtaccctgtaacaaaacctagagcatgacctgaaaggataatgtatttccaaataactgcatcctagaagaaagctcaggaatgtgtttaggaatacaaaatatctgatacctgatacgtaaaagtcccagccttctactcagaaattcccatacatataaagaagcaagaaaatatgacccacaataaggaaacaaataattaataggagcagatccagaaatgacaaagataatagaattagtggacagagacattaaaacagttattttgaccgttattttatgcaatcaagaaaacatgttagagacatgaaaggtgtaaacagatccaaatcaaactttcagaagtaaaactacaatgtctgacatgaaaaatgcactggatgggattaacagcagaagtcattgctgaaaatttccacatttgatgaaaaatacacacatccaagaagctcaacaaacccggagcacaagaaatatgaagaaaattataagatacattataatgaaatcacttaaaatcagtggtaaagaaaaaaatctgaaaaatagccagacggggggaaaagagcacattacatatggaagaacaaagataaggatggcaggagtcatcattgcatctcattgaacagtgaagccagaagatagtggtgcagaatcttttaagtactgatagcaaaaactatcaactaggattcattacctactaaaaatttatttcagaaatgaagatgaaataaagacttttcccagacatgtaaaagcgagataattcatccgcagcagatctgcattacaagaaatgtgaaaagatgtccttaggcagaagggaaatgataccaaatggaaatctgaaaatgaatacagagtaccagagatggtaattatgtggataaatataaattactcttaccataactgaatatttaaagcaaaaataaacgcattatgaagtaaaagttaataacaaaaaagagcaggagggagaaatattgttgttaactagtttgtttttttcttgagagacgggttctcactgtgttacccagactggccttgaactcttgagctcaagtgatcctcttgcctcagccacccaagtagctgggactttaggcatacaccactgcacctggctctgttgtaagattcttaaaccatacttgaattggtatggtatcatttgaattagactgtcatgaattaaaaatgtataccataaattctgaagcagccactgaaataacagatatatagttaattaaccaacaaaggaggtaaaatgcaatcataaaaacaactcagctaacccaaaagaaggtagagaaagaagacaactagaacaaagaatagataatatggataggaaactaatagcaagatgactcaactgtatccatgagcacattaaatgtaaattgcccaaatgtctcaattaaaaggcagatgtgttagattgaataaaaaaacaagatgctacaagaaatctactttaaatgtgaagacacaaaggttaaagtaaaaggatggagtaagatatttatatagctactttaattattttcatgattgcctggctagcaataatgaaaataattaaagtagctatatgaatatcagataaagatttcagagccaagactattaccagagataaagaagagtgttatataatgataaagagattaattcctcaagaggacataacagtcccaaacattcgtgatctaatagcttcaaaaatcttgaagcaagatgttaagaactacaaggaaaaatagacaaattcacacttaaaatcagagacttcaatacccctctcgataactgataggaaggtagaaagaaaatcagtaaggatacagatgacttgaacaacaatactgaacacaacatatcctaattgacattaagtgtaccctttacccaacaacagtagaatgcaccttcttttgaaagaagaatggatcataaagtaagcctcaataaatttaaaaggattttagtcagatagtgtgtaatttcctgaccacagtagaattaacttggaaattaataacagagaggtatctaggatatcttcaaatattgggaaattaacatattccaactaacccttgggtcaagaaaatgaaaagggaaattacaaagtatcatgaactgaatgaaaattagaacacaacatcaaaatttatagcatgctactaaagaagtatatatagagacatttgtagcactaaatatttgtattagaacaaaggtctcaattcaatgacctttagtttcttccttaagaaataagaagaaaaagagaaaattaaaacccatagtaagtagaagggaaataataagagaatgaagaccaatgaaatggaaaatagtaaaaccataaaggaaagaaaaactggcagagtgtagtggcttatgcctgtaatgccaacactttgggaggctgaggcaggaggattgcttgagcccagcagagcagttcaagaccatcctgggtaacatagtgagaccccacctctaccaaaaaaaataaaaaataaaaaccctaaactggctttttggaagatcagtcaaattgacaagactcttgccggaatgatcagataaaaaagagaaaagacacaatatcaggattgagagcggtatcttcactttagatccttcagatgtttgaaagataataaatactataaacaactttatgccaataaattcagcaagttaaatgaaatggacatattacttgaaaggcacaaactaccaaaattcactcaagggaaaaaaaaagataatatcagtagtactttatctacaaaataaattgagtttgttttaaaaacgtacctcaaagaaaacttcaagcccagatagatttgccggtgaattataccacacatttaaggaagaaatactactgattctgtacaaagtgttccagaacattgaagaggagagaaaattctttgcaacttatgtgaagccagcatagcactcagaaacccaaaccagaggaaagcataagaaatccacagtccaatatctctcatgaacacagatataaagattcttaataaaatattaaatagaatttaacaatatataaaaagggcaatatatcactcaaggagagtttattcctgcaatgggttgttggtttgatatttgacagtgagtcaatataattcatcatattagcaatctaaaaaggagaaatcatataatcatctcagtaagatgcaggaaaaaacatttggcaaatccgccatccattcctgataaacgccttatgcaaagggagtagtggagaactttgttaacctgagaaaggacatctacaaaaaaattctctaactgacagcacacttaatgttgaaaaactagctttgtttctaagatccaaaataggtcaagagtattcccgtcaccacttatgtcattgtactggaggttctaggtagtgcactaaggctggaaaaggagataaaagatatccacatcaaaaagcaagaaataaaattgtctttattagcaaatgacatggttatgtagaaatgcctgtggaatttacaaaagaactcctagataaatgagttcagaatgcttccagagtatgagatatacaaaaattatgatcctatttttatagtgttaaaaactatgtatcattgaaaaatgaccaaaagaacatgattctctatggttgataggttcttaaattttctttgattttttttttccccccaatttggcttttctaatttttcatcaggtgtttacttttgtaataatagccataaaaggtattgttttcagaaatataattttaagccccactatataaatgtaaatgtaatagagtttaataatttttagtaaacatcactattcaaatccttacatttaaaacatgtaggaacttacattcagtttatgttttcttattctgacctgccattttatacatcaatcagctatgccacctttccttgatctccaaaatataaggcattgtgagggcctgtgattgcattcataattcatttctccccacatattgatgagtgtcacctgtgtaccaggttttggggaatgcaatgatgaagagaccttatggcctctgaaacttacacttttctccatcctcacctcttgccattttctctctttgcttaatgtattccagctatatgacgcttcttttagttcttggaaagcccattcactctcatggcctcacacattcagttttctctggcaaggatacttcttcacacccccaccctccacccctcaactccatactctgttatcttctgggcttaaatgtcacttcctcagggaagctttcgctcatctccctgacagggttgtatactttaatagcaccttacactttcccttcccagaatgtattactgttgtatttaatactttttgtgtgatctgtatttggaaatattgttgtaggctagtatttccatcacagatatgttcttctgcattgttctgcagaggtgggctttagtttatcttgagctgttaagtctgttgtttcaccttatgataaaacaacttggcctcttggctgaattattagcacaatctgtggccaggattagatggaacaaatccagttgttaataatgtaccataaacataactgttggaatttcaggtaacacaggaagaaggacaacagttagcacggcagcttaaggtaacatacatggaggcatcagcaaagattaggatgaatgtagatcaagctttccatgaacttgtccgggttatcaggtaagcaaaacacattctagatgtgtgttttaataaattactattaaatgtttttagtaaggatattttatatggaagtgattcctttctagggattaatgcacatggtgcattacaatttttaagtacatattctaggcacttctagaatataaaatataatttaattatgaagtataaagtacacataggattttgataagaataaatgctgcttccaaagggggtgatggtgtgaagatagtgatgacagcagctaacttttgcatggtagtctctgccagcttctgtgctaaacgtttttacatgtattattacatgtaatcctcaccctcgcccaataaactaaatactgttttatcctcactttcagaggagaaaatgggggtacagagaaagaagttaaatagcttgttcaaattaagacatattaaatggcagaactggggctttaattcaaacctctgattccagagcctgtgctcctacctttctttttatccagctcatcccaggctaagagtaaaccaggtagtagagattaaataatcctgtaaggtgtgaagtataatgtcccacacaacagagaatttttctgttagatgccatagggggccttttggtttaaaaagtgttaacgggttccaagaagcttaaggtgttgggtgaggtctgatagaattacgaggtacgtttgtgggtgagaaagatgaagttgctttagtgagtaggatttgatttattattttgggtcttgatgcctggcccctgtttcatactctgctctgtagatctgggattctctgctagttagacagtttgataggaatgtgaagtgggctgctttttttttttttttttttttttttttttttggaaacagagtttctctttgtcacccaggctggagtgcagtggtgtgatctcggctcattacaacctccgcctcctgggttcaagcaattctctgcctcagcctcctgaatagctgggatttacaggcgcctgccaccacatccagctaatctttgtatttttagtagagatggggtttcaccatattggccaggctggtctcgaactcctgacctcgtgttccacccgcctcagcctcccaaagtgctgggattacagcgtgagccaccgcacctgggctgcgtatttattttgtatctaaggtaaattgacacctgagcgatgatcttctacttattagctccttgccaaggcattgtctttctgtggaggaaaaaaaagtgaaggttatagctttttcttttttagtagtttgttaaaaatcccagtcccatttttttttaatggtaagagtctcggttttataagatgaaaaagagatctggagatggatggcgatgatggttgcacaacatcatgcatatacttgataccatcaaattgtatacttaaaaatgattaagatggaaaattttatgttatatgtattttacccccctttcccattccagttccattttagtgttaagcaactgatgaggcagtgccttcttaaaataattatgactgccgttttgaaatgttgtcctttgttttggttcttaggatctctccttacccatcagtaattcaggaatgaggggagaagtagaggaggttttttgtttgttttgtttttaatgccaggagctattagatatattctaacatcacaagatctttaatcctcacaacagctgtgaaaggtaggtttccattattcccctctaaaaaaactggggctcagactaggtcaactaactttgtctaatactgaatttaaaaaatggcagaacacagataagacctgcatacctcataaggttaattttatattgcactctaatgatgaatctttattcttaaggataccttagagtcatggaatttcaaattgggatgggaacttagagattactgagtctagtatctcgtctgattcaggactcatccattaaagcagcttcatagctctgcttgtgctggtgttgacgcgtttgtgcccttttttggtgggggtaggaaagagagaaattccctcgttgaagtttaacactgaaaagcatacacacttaaaagtgaacttgtacaaaaaataacctgtgtttgtaatagtagattaccaagaaggcaattatattttagaattttttatcttacaggaaatttcaagagcaggaatgtcctccttcaccagaaccaacacggaaagaaaaagacaagaaaggctgccattgtgtcattttctagaatcccttcagttttagctaccaacggccaggaaaagccctcatcttctctttctctcctcagtttacatcttgttggtacctttctagccttagacaaatgatcaccatgttagccttagacgaagaagctggctagtcctttctgtgaagctaatacaatggtcatttccagacaaatttaaaggaaacactaaggctgcttcaaagattatctgattcctttaaaatatatgtctatatacacagacatgctcttttttaagtgcttacattttaatagagatgaatcagttttggaatctaagctgtttgccaagctgaagctacaggttgtgaaataatttttaacttttggaatcacactgcctactgttactctaaatagaaatatagggtttttttaatgtgaatttttgcctatctttaaacatttcaatgtcagcctttgttaaccttaaatacactgaattgaatctacaaaagtgaaccatctcagacctttacttatactacaacttttgttttctggtggccaaaataccaaatgcctgttgtatttatggattaaaaactgctcataaaagcctgtgttactgctcctactcttgaagatggtaatattctacgtggtcaaatatttggactcatttaggacttagatatttcagtgtacttggttttttaatttaactctttttcacagccacgctaagggtaaaaaggaataatttccttctgtcttccttttcaagtatttctgggtaagggattcaaaaaactaaaactgtttttgtttgtaatataaaatatggaattgatctttccagggtcagagatgattaatgtttttgctatatacttttatacattattttcttatcaaactagttaacaagtatttttatatgtttgtaagcagatatgctttcatagcataccttgtgtatatgtaaagataagtatttaattctcactgttcacttttaactgacaaagaaaaacaagtggaaactacagaaactgtggtagaacttttacttgctggtctggtcttggttgtacccatctttggccagtcacataactactcaagaaaccttcccaatagagtacaacaggatgagactctgaaatcactttcagtattccctgctagatattgattgttatttcaagtattaagtgtaagcttttaatggataattagtataactgtggatggcatctgattttgtttttaattctgtggattgtgtttaagcaattcaatagtatgttcctgattttgagatgctaagtggtattgcacagttgtcactttatcaagtgtgtacaacagtcccatgaagtttatagagcatacccttgtatagcttcaggtgctagaattaaaattgatctgttatcacaagatgatgtttgattactcattgtgttaattaagtggtttcttaagggaacaagtgttagtgaaacttactttagtagctctgttccttttctccagtgccttagggtttgaatctagaagtcagcattggtcattcagcaggtggaggggatgtgaaacagtttgatgttctttgacttgttgaatatttacttaagtccgtgtttcttaaactttttctatgaagtgctcctgatatagaaacccaactgtagaggaaggtgaatacctacacagataccccatgaagatgaaactgaaaacagctaaagccacacacacatttatttgaagaccagtaaaaataatataattgtctgggtgcagtggcgcacacctgtaatcccagcactttgggaggctgaggcaggtggatcacctgaggttaggagttcgagactgcctgaccaacatgatgaaaccccatctctactaaaaatacaaaaattagctgggtgtggtggcgggtgcctgtaatcccagctatttgggaggctgaggcaggagaatcacttgaatttgggaggcagaggttgcagtgagctgagatcgtgccaatgcacgccagcctgggtgacagattgagactgtgtctcaaaaaaaaaaattgtgtaattatgcactgtacttgatagtataactatgttgatatggaattatcttccatgtcttctagtacaattactgcccaggaagataccatgtttatcctgtggcttttgttactgtagcactatcatgtataccttggtagtactttcagttggcaaagtttatttgttttagttaactcagataacgnnnnnnnnnnnnnnnnnnnnnnnnnnnnnnnnnnnnnnnnnnnnnnnnnnnnnnnnnnnnnnnnnnnnnnnnnnnnnnnnnnnnnnnnnnnnnnnnnnnnnnnnnnnnnnnnnnnnnnnnnnnnnnnnnnnnnnnnnnnnnnnnnnnnnnnnnnnnnnnnnnnnnnnnnnnnnnnnnnnnnnnnnnnnnnnnnnnnnnnnnnnnnnnnnnnnnnnnnnnnnnnnnnnnnnnnnnnnnnnnnnnnnnnnnnnnnnnnnnnnnnnnnnnnnnnnnnnnnnnnnnnnnnnnnnnnnnnnnnnnnnnnnnnnnnnnnnnnnnnnnnnnnnnnnnnnnnnnnnnnnnnnnnnnnnnnnnnnnnnnnnnnnnnnnnnnnnnnnnnnnnnnnnnnnnnnnnnnnnnnnnnnnnnnnnnnnnnnnnnnnnnnnnnnnnnnnnnnnnnnnnnnnnnnnnnnnnnnnnnnnnnnnnnnnnnnnnnnnnnnnnnnnnnnnnnnnnnnnnnnnnnnnnnnnnnnnnnnnnnnnnnnnnnnnnnnnnnnnnnnnnnnnnnnnnnnnnnnnnnnnnnnnnnnnnnnnnnnnnnnnnnnnnnnnnnnnnnnnnnnnnnnnnnnnnnnnnnnnnnnnnnnnnnnnnnnnnnnnnnnnnnnnnnnnnnnnnnnnnnnnnnnnnnnnnnnnnnnnnnnnnnnnnnnnnnnnnnnnnnnnnnnnnnnnnnnnnnnnnnnnnnnnnnnnnnnnnnnnnnnnnnnnnnnnnnnnnnnnnnnnnnnnnnnnnnnnnnnnnnnnnnnnnnnnnnnnnnnnnnnnnnnnnnnnnnnnnnnnnnnnnnnnnnnnnnnnnnnnnnnnnnnnnnnnnnnnnnnnnnnnnnnnnnnnnnnnnnnnnnnnnnnnnnnnnnnnnnnnnnnnnnnnnnnnnnnnnnnnnnnnnnnnnnnnnnnnnnnnnnnnnnnnnnnnnnnnnnnnnnnnnnnnnnnnnnnnnnnnnnnnnnnnnnnnnnnnnnnnnnnnnnnnnnnnnnnnnnnnnnnnnnnnnnnnnnnnnnnnnnnnnnnnnnnnnnnnnnnnnnnnnnnnnnnnnnnnnnnnnnnnnnnnnnnnnnnnnnnnnnnnnnnnnnnnnnnnnnnnnnnnnnnnnnnnnnnnnnnnnnnnnnnnnnnnnnnnnnnnnnnnnnnnnnnnnnnnnnnnnnnnnnnnnnnnnnnnnnnnnnnnnnnnnnnnnnnnnnnnnnnnnnnnnnnnnnnnnnnnnnnnnnnnnnnnnnnnnnnnnnnnnnnnnnnnnnnnnnnnnnnnnnnnnnnnnnnnnnnnnnnnnnnnnnnnnnnnnnnnnnnnnnnnnnnnnnnnnnnnnnnnnnnnnnnnnnnnnnnnnnnnnnnnnnnnnnnnnnnnnnnnnnnnnnnnnnnnnnnnnnnnnnnnnnnnnnnnnnnnnnnnnnnnnnnnnnnnnnnnnnnnnnnnnnnnnnnnnnnnnnnnnnnnnnnnnnnnnnnnnnnnnnnnnnnnnnnnnnnnnnnnnnnnnnnnnnnnnnnnnnnnnnnnnnnnnnnnnnnnnnnnnnnnnnnnnnnnnnnnnnnnnnnnnnnnnnnnnnnnnnnnnnnnnnnnnnnnnnnnnnnnnnnnnnnnnnnnnnnnnnnnnnnnnnnnnnnnnnnnnnnnnnnnnnnnnnnnnnnnnnnnnnnnnnnnnnnnnnnnnnnnnnnnnnnnnnnnnnnnnnnnnnnnnnnnnnnnnnnnnnnnnnnnnnnnnnnnnnnnnnnnnnnnnnnnnnnnnnnnnnnnnnnnnnnnnnnnnnnnnnnnnnnnnnnnnnnnnnnnnnnnnnnnnnnnnnnnnnnnnnnnnnnnnnnnnnnnnnnnnnnnnnnnnnnnnnnnnnnnnnnnnnnnnnnnnnnnnnnnnnnnnnnnnnnnnnnnnnnnnnnnnnnnnnnnnnnnnnnnnnnnnnnnnnnnnnnnnnnnnnnnnnnnnnnnnnnnnnnnnnnnnnnnnnnnnnnnnnnnnnnnnnnnnnnnnnnnnnnnnnnnnnnnnnnnnnnnnnnnnnnnnnnnnnnnnnnnnnnnnnnnnnnnnnnnnnnnnnnnnnnnnnnnnnnnnnnnnnnnnnnnnnnnnnnnnnnnnnnnnnnnnnnnnnnnnnnnnnnnnnnnnnnnnnnnnnnnnnnnnnnnnnnnnnnnnnnnnnnnnnnnnnnnnnnnnnnnnnnnnnnnnnnnnnnnnnnnnnnnnnnnnnnnnnnnnnnnnnnnnnnnnnnnnnnnnnnnnnnnnnnnnnnnnnnnnnnnnnnnnnnnnnnnnnnnnnnnnnnnnnnnnnnnnnnnnnnnnnnnnnnnnnnnnnnnnnnnnnnnnnnnnnnnnnnnnnnnnnnnnnnnnnnnnnnnnnnnnnnnnnnnnnnnnnnnnnnnnnnnnnnnnnnnnnnnnnnnnnnnnnnnnnnnnnnnnnnnnnnnnnnnnnnnnnnnnnnnnnnnnnnnnnnnnnnnnnnnnnnnnnnnnnnnnnnnnnnnnnnnnnnnnnnnnnnnnnnnnnnnnnnnnnnnnnnnnnnnnnnnnnnnnnnnnnnnnnnnnnnnnnnnnnnnnnnnnnnnnnnnnnnnnnnnnnnnnnnnnnnnnnnnnnnnnnnnnnnnnnnnnnnnnnnnnnnnnnnnnnnnnnnnnnnnnnnnnnnnnnnnnnnnnnnnnnnnnnnnnnnnnnnnnnnnnnnnnnnnnnnnnnnnnnnnnnnnnnnnnnnnnnnnnnnnnnnnnnnnnnnnnnnnnnnnnnnnnnnnnnnnnnnnnnnnnnnnnnnnnnnnnnnnnnnnnnnnnnnnnnnnnnnnnnnnnnnnnnnnnnnnnnnnnnnnnnnnnnnnnnnnnnnnnnnnnnnnnnnnnnnnnnnnnnnnnnnnnnnnnnnnnnnnnnnnnnnnnnnnnnnnnnnnnnnnnnnnnnnnnnnnnnnnnnnnnnnnnnnnnnatcttggctcactgcaacctgcctcgggctcaaagtcatcctcccccttaagcctcttgagtaggtggggctacagaggcacattctaccacacctggctactttttatactttgtgtagagatgaggtcttgccctgttgcctaagctggtctcaaactcctggactcaagctgtctgcccacctcagcctcccaaagtgtttggattacaggcttgaggcactacacccgatccccataaccatttcttttgctgctgtttaattctgctatgaatcctatccagtgaattttcattttggattttgtgggtttttttccccctggaaattatgtttgggtatatatatatatattttgtttttctcctcattatgttcatgtattcctcttaaccagcccctctcaactggttttgcagaacattgagccctgaattaacacacaacagatacggcattagggcccaatttgcatctggaaaatttgcattgtacgtttgcatctagaatggcacagccatgtaccatccttgggaaaataaagaaaatagttcctcaaataactttctgtggggctcaattctcttacagaactgtgattgagaaagactgctttgaatatttgaatgtagttataatagctgttttgagtctttgctgattctattgcttgtataatttttggatttgtttctactgactgatttttctctagttataggtcacattttttttgttttttcacatgccaagtaagttttggttggatgaaggacattgtgtattttatgttgttgggtatctagattttgttggcgtctttgttgggtttcgttctgatagttaatttactgactgcagttcagtttgatcctttcgagatctcttttaaagctaatacagtctcaagtagcctttttcccaggctagtttagctccactactaaagtatgacccttttggggtctgtctgctgaatgccctgaattatcaatttggcttgtgggaactcaaagaattcccagccccgtgtgagctctagggaacaattctattcacagttcctgggtcattctttgcccaacctcctggagttttcatcctagacatatgtatcttaatagtcagcaaagactcataaactctatgcatgtttttggatctctttttatgtgtagctgtcttctcagcacaactttgtcctgtgacttctagttgtttcagacttcctgttctttaatgtctcctttcagcccagggaaacatttgtgttctacatggaatcccccatcccctctacagtctggaatgtgcctccaggcagatggccagggcagtgttgaggcttacccaacttctttcccttccatcaggattgtagtcctttgctacctggtgtacaatgtctgaatgtatttagtctagggtttttgtttttgtttttgtttttgttttgagacacagtcttgctctattgcccaagctggagtgcagtggtgcgatctcagctcactgcaacctccgccttctgagttcaagcaattctcctgcctcagcctcccgaatagctgggattacaggcatgtgccaccacacctggctaatttttgtatttttagtagagatgggctttcatcatgttggccagtctggtctcgaactcctgacctcaggtgatccgcccccctcggcctcccaaagtgctgggattacaggcgtgagccaccacacccgactagtccagttttttttcttccgagacaaagtcatgttctgttgcccaggctggagtgcagtggtgcgatcttggctcactgcaacctctggcttccaagttcaagcaattctcttgcctcagcctcctgagtagctgggattacaggctcgcacaaccatgcccagctaatttttgtatttttagtagaaacgggttttcaccatgttggccaggctggtttcaaactcctgacctcgtgatccgcctgcctcagcctcccaaagtgctgggattacaggtatgagccactgtgcccggcttagtccagtttttaaattgtctaagataggagggttaatctggttcctgttactccattgtgattggaagttgaagtgtttcccatttgccttgtagctttttaaatctctgacttgaaacttttcttaaaaagagtggacagtctcatggaatgaatagtccttgtctatgtggccattttttctctataattgggagtttgcaaattttttcataaagggccagattgtaagtgtcatcttgggctttggcggctatatctctgtcccaactagtctagcctgccattatagcactgaagcagccataagcaatgtctaaatgaatgtggctgtgttccaataaaactttgtgtatactgatgtttgtgtttcatgtcatcatcatatgtcatgaaatatgactctctttttgcagttgtgaaaaccattctgtacaaaaacagatggtgggatggatttgacccacaggccatggtttgccagccctgctttattatagcacatttagcatttgagcgattctttagaatctcttaagtctctttatgtggaagttctttcagacagcatttcctgaatggatggtcatgaatttgtgttctaggtgttttctttctatattgtttgtttagagatttacagtatctcagagttggacattatgcccttattggcatagattgtgcccttattgactattttatcatttgacttttaaaatgtgatgtaacaaggttgtatatactttgtctagcttgctcctcttctgtttatcaccacttgttttaattcattttatttcttttcccatagctgtacgctatacgtaatgatcccacttaacaggtaagtaggggccaagcatagtatctcatgcctctaatcccagcactttgagacgacaaggcacgtggattgcttgagaccaagagttcaagaccagcccaggcaacatagccagatcctgtctccataaaaaagtaaaaatagaaattagctgggcatggtggcatgtgtctgcagtctcagctactctggagactgaggtgggaggagtattttagcccaggaagtttgaggcagcagtagagctatgatcctgtgatcagcctaatagtgagaccctatctatctatttatttatttatttattttcagatggagttttgctctgttgtcnnnnnnnnnnnnnnnnnnnnnnnnnnnnnnnnnnnnnnnnnnnnnnnnnnnnnnnnnnnnnnnnnnnnnnnnnnnnnnnnnnnnnnnnnnnnnnnnnnnnnnnnnnnnnnnnnnnnnnnnnnnnnnnnnnnnnnnnnnnnnnnnnnnnnnnnnnnnnnnnnnnnnnnnnnnnnnnnnnnnnnnnnnnnnnnnnnnnnnnnnnnnnnnnnnnnnnnnnnnnnnnnnnnnnnnnnnnnnnnnnnnnnnnnnnnnnnnnnnnnnnnnnnnnnnnnnnnnnnnnnnnnnnnnnnnnnnnnnnnnnnnnnnnnnnnnnnnnnnnnnnnnnnnnnnnnnnnnnnnnnnnnnnnnnnnnnnnnnnnnnnnnnnnnnnnnnnnnnnnnnnnnnnnnnnnnnnnnnnnnnnnnnnnnnnnnnnnnnnnnnnnnnnnnnnnnnnnnnnnnnnnnnnnnnnnnnnnnnnnnnnnnnnnnnnnnnnnnnnnnnnnnnnnnnnnnnnnnnnnnnnnnnnnnnnnnnnnnnnnnnnnnnnnnnnnnnnnnnnnnnnnnnnnnnnnnnnnnnnnnnnnnnnnnnnnnnnnnnnnnnnnnnnnnnnnnnnnnnnnnnnnnnnnnnnnnnnnnnttagagtgataaaaaacaaatgctgggaccccctttcaaggcagagtaggaaaagcattcaaaaagtgttgtccagcagaagggattgtagcatatatttctcctggaaaatctgagggaacttcttaattagaattggtgtttaagctggagctcgatggattggtaggatttgagatggagaggagagaagagtgagggtggaaagatgagaaaggcccagagttggcagaatgcagggtgtattctggactggaaccttggcctaaaaagattctacatgcaatgggaaaaaaatatgataaaatagactgggatcaggttgtggagggctttaaataggatggcccttctgtgtataatgggaaactgccaaggattctgaacaggaggtgcctggatctaatctagtggtagcataatggcagagaagtgcaaatttggtggtcagatagaggttgttggaatcatggaatctgttctcttagtattataaactcagtgagggcagaatcacgtctgttgtgtttatattgcctggcatgtgctgaaaagccatttgatgaatggatgatttcagaaagagagacaatgaagacctgaactgcagtgacatggggagaaggagactgaacactggagggatatccaagtgatgtttgagtctccaaaatactgtctggatgaccaggaaggtggtggtgctattaattaaaataaggagtataggcaactctctagtgatagaaatttatgtgacaatcccatacagggttagtccaggaggcatttgggaatggggaatgggaattggaggtcaaaagaggctgctcggactaggaatgcagatttgaaatttgtctcttttgagcttagtgattgaggagataagaatgggtaatatcctccaggaagagagtgtttgaggagagggtccaagggtaaaactttggggaaaacaaacatgggaggtagaagatgaagaggcagcaaaaagccaagagaagtagccagaaactggagagaaccacgaggctgttttgtgaaggaagccacggaggtggtggaaagcattgagtgctgtgcagaggatgggggagtgagaggctgcactggtcttgtgcggttgctgatgacttccttagatttatttcagtcttctggttgtggaaaccagatgatagtgagttgaggtgtgattggaggctaaggatgtggaggaagtaagtgtgggctattttgagaaattctgtggcaaaagcagggcaagatggggaagttatcttgttttacagggtaggaggttagaggaataagaataagccactgcaagttacttaatcacagatagggaggtatgcagatctggaactatgtattcacacctggatccttcagcgtttgagaaatttagaaacctagttcgcagactctagcacatgcctctctgatgggggagagtggcacagtgcagcttctcaagacttatctgcattggagggccaggttaaaagattgttagtctccagtgttgtggactgatacttttctaaatgttataaaaaatgaattatttggaaaataatcattctcctgtatatcatggcagtgtcaaattaagagtttctaaacacttgctttcagtttctttatctcatttgtggatcttatcaggctgcaggtcttgatttgggcagcactagtgtagtggggaagggagcaggagagtcgagtgtttttcacaggtggctcttttgacttcctctgtaggctagtgattccaggttagaaccactgagtaacagttacattccaacactagaaaaagagggactatgtttataccaactccaggtgttggagtcagtagacttgaataagatgttttcacccttttcccttctgtgaatacttacagattatttgaggtaaagaaaaattgcttaaacatgcaactgcttaaaatatgagaactattaccaatcagttataaagactaggagtatttagaacagtatgagaaaatgttaatgagtgctatcttatgttaagacattatgaatattatgaatgttaagtgaagacaaatttcatttttgctctgataactgtaaaattatgcatgcatattttatttgtcatgacattttcagttataagtgacagaaatgcaacccaaaccagcttcacacagtgcatgcatttacttatttatgaagtgagggttgggtggagtgcagttggctttcaatgagtcctacaacaggataccatcaagacccacgtgtaagaattgtctaaattgtggaggtggagtagaggtgtctgctagtaggagagagtttgtgtcgaagcctaaggccagaaaaggtaaaataactggccccaaccctcatgggtactcaggtgcag

SEQ ID NO: 469 - DNA, 2352 bp, Homo sapiens
gctgccgcccctggcccgtgccgtcaccccgcttctccgcgcctcgggcggtacccagccagtccccagcgccgcgctaccgcgctgaccggccctccagacgcctcccggtacccgggaccccagcccggccgctcgcccgcagcccgccggccgcacacgtccccggagccgggcctagggcgggcggcagcggcggctcggcgcagtcaggctgggctctgtagcgtccccatggccgcggccggctggcgggacggctccggccaggagaagtaccggctcgtggtggtcggcgggggcggcgtgggcaagtcggcgctcaccatccagttcatccagaatcatttgttgaagaaatacctccactgtgaatagtatagtacctggatgctctagatgatattaaagaagtaaaggaagcagtcctattttgtaacggattatgatccaaccattgaagattcttacacaaagcagtgtgtgatagatgacagagcagcccggctagatattttggatacagcaggacaagaagagtttggagccatgagagaacagtatatgaggactggcgaaggcttcctgttggtcttttcagtcacagatagaggcagttttgaagaaatctataagtttcaaagacagattctcagagtaaaggatcgtgatgagttcccaatgattttaattggtaataaagcagatctggatcatcaaagacaggtaacacaggaagaaggacaacagttagcacggcagcttaaggtaacatacatggaggcatcagcaaagattaggatgaatgtagatcaagctttccatgaacttgtccgggttatcaggaaatttcaagagcaggaatgtcctccttcaccagaaccaacacggaaagaaaaagacaagaaaggctgccattgtgtcattttctagaatcccttcagttttagctaccaacggccaggaaaagccctcatcttctctttctctcctcagtttacatcttgttggtacctttctagccttagacaaatgatcaccatgttagccttagacgaagaagctggctagtcctttctgtgaagctaatacaatggtcatttccagacaaatttaaaggaaacactaaggctgcttcaaagattatctgattcctttaaaatatatgtctatatacacagacatgctcttttttaagtgcttacattttaatagagatgaatcagttttggaatctaagctgtttgccaagctgaagctacaggttgtgaaataatttttaacttttggaatcacactgcctactgttactctaaatagaaatatagggtttttttaatgtgaatttttgcctatctttaaacatttcaatgtcagcctttgttaaccttaaatacactgaattgaatctacaaaagtgaaccatctcagacctttacttatactacaacttttgttttctggtggccaaaataccaaatgcctgttgtatttatggattaaaaactgctcataaaagcctgtgttactgctcctactcttgaagatggtaatattctacgtggtcaaatatttggactcatttaggacttagatatttcagtgtacttggttttttaatttaactctttttcacagccacgctaagggtaaaaaggaataatttccttctgtcttccttttcaagtatttctgggtaagggattcaaaaaactaaaactgtttttgtttgtaatataaaatatggaattgatctttccagggtcagagatgattaatgtttttgctatatacttttatacattattttcttatcaaactagttaacaagtatttttatatgtttgtaagcagatatgctttcatagcataccttgtgtatatgtaaagataagtatttaattctcactgttcacttttaactgacaaagaaaaacaagtggaaactacagaaactgtggtagaacttttacttgctggtctggtcttggttgtacccatctttggccagtcacataactactcaagaaaccttcccaatagagtacaacaggatgagactctgaaatcactttcagtattccctgctagatattgattgttatttcaagtattaagtgtaagcttttaatggataattagtataactgtggatggcatctgattttgtttttaattctgtggattgtgtttaagcaattcaatagtatgttcctgattttgagatgctaagtggtattgcacagttgtcactttatcaagtgtgtacaacagtcccatgaagtttatagagcatacccttgtatagcttcaggtgctagaattaaaattgatctgttatcacaagatgat

SEQ ID NO: 470 - protein, 171 aa, Homo sapiens
RKQSYFVTDYDPTIEDSYTKQCVIDDRAARLDILDTAGQEEFGAMREQYMRTGEGFLLVFSVTDRGSFEEIYKFQRQILRVKDRDEFPMILIGNKADLDHQRQVTQEEGQQLARQLKVTYMEASAKIRMNVDQAFHELVRVIRKFQEQECPPSPEPTRKEKDKKGCHCVIF

SEQ ID NO: 471 - DNA, 1404 bp, Homo sapiens
cgggagggcggagctggaagggtgggaagcaccgatccaccttattgctctggccgaggccagagacctccgggagaggctgggccaccgagccgggctttactgctccgagggtccgggcgtggggctggagctggagccccgcgcgctgcttttccagccgcctgcggccgcgccttcaccgtcggggcgatagcggtggcaacttggccgcggctccgcgtggtctccgggcttccccgcgccgcctgagccggagctgcccgcttcaatcctattttgtaacggattatgatccaaccattgaagattcttacacaaagcagtgtgtgatagatgacagagcagcccggctagatattttggatacagcaggacaagaagagtttggagccatgagagaacagtatatgaggactggcgaaggcttcctgttggtcttttcagtcacagatagaggcagttttgaagaaatctataagtttcaaagacagattctcagagtaaaggatcgtgatgagttcccaatgattttaattggtaataaagcagatctggatcatcaaagacaggtaacacaggaagaaggacaacagttagcacggcagcttaaggtaacatacatggaggcatcagcaaagattaggatgaatgtagatcaagctttccatgaacttgtccgggttatcaggaaatttcaagagcaggaatgtcctccttcaccagaaccaacacggaaagaaaaagacaagaaaggctgccattgtgtcattttctagaatcccttcagttttagctaccaacggccaggaaaagccctcatcttctctttctctcctcagtttacatcttgttggtacctttctagccttagacaaatgatcaccatgttagccttagacgaagaagctggctagtcctttctgtgaagctaatacaatggtcatttccagacaaatttaaaggaaacactaaggctgcttcaaagattatctgattcctttaaaatatatgtctatatacacagacatgctcttttttaagtgcttacattttaatagagatgaatcagttttggaatctaagctgtttgccaagctgaagctacaggttgtgaaataatttttaacttttggaatcacactgcctactgttactctaaatagaaatatagggtttttttaatgtgaatttttgcctatctttaaacatttcaatgtcagcctttgttaaccttaaatacactgaattgaatctacaaaagtgaaccatctcagacctttacttatactacaacttttgttttctggtggccaaaataccaaatgcctgttgtatttatggattaaaaactgctcataaaagcctgtgttactgctcctactcttgaagatggtaatattc

SEQ ID NO: 472 - protein, 256 aa, Homo sapiens
GGRSWKGGKHRSTLLLWPRPETSGRGWATEPGFTAPRVRAWGWSWSPARCFSSRLRPRLHRRGDSGGNLAAAPRGLRDRRLSRSCPLQSYFVTDYDPTIEDSYTKQCVIDDRAARLDILDTAGQEEFGAMREQYMRTGEGFLLVFSVTDRGSFEEIYKFQRQILRVKDRDEFPMILIGNKADLDHQRQVTQEEGQQLARQLKVTYMEASAKIRMNVDQAFHELVRVIRKFQEQECPPSPEPTRKEKDKKGCHCVIF

SEQ ID NO: 473 - DNA, 2297 bp, Homo sapiens
agacgcgtagaggagcgcgccccccggccgctgccgcccctggcccgtgccgtcaccccgcttctccgcgcctcgggcggtacccagccagtccccagcgccgcgctaccgcgctgaccggccctccagacgcctcccggtacccgggaccccagcccggccgctcgcccgcagcccgccggccgcacacgtccccggagccgggcctagggcgggcggcagcggcggctcggcgcagtcaggctgggctctgtagcgtccccatggccgcggccggctggcgggacggctccggccaggagaagtaccggctcgtggtggtcggcgggggcggcgtgggcaagtcggcgctcaccatccagttcatccagtcctattttgtaacggattatgatccaaccattgaagattcttacacaaagcagtgtgtgatagatgacagagcagcccggctagatattttggatacagcaggacaagaagagtttggagccatgagagaacagtatatgaggactggcgaaggcttcctgttggtcttttcagtcacagatagaggcagttttgaagaaatctataagtttcaaagacagattctcagagtaaaggatcgtgatgagttcccaatgattttaattggtaataaagcagatctggatcatcaaagacaggtaacacaggaagaaggacaacagttagcacggcagcttaaggtaacatacatggaggcatcagcaaagattaggatgaatgtagatcaagctttccatgaacttgtccgggttatcaggaaatttcaagagcaggaatgtcctccttcaccagaaccaacacggaaagaaaaagacaagaaaggctgccattgtgtcattttctagaatcccttcagttttagctaccaacggccaggaaaagccctcatcttctctttctctcctcagtttacatcttgttggtacctttctagccttagacaaatgatcaccatgttagccttagacgaagaagctggctagtcctttctgtgaagctaatacaatggtcatttccagacaaatttaaaggaaacactaaggctgcttcaaagattatctgattcctttaaaatatatgtctatatacacagacatgctcttttttaagtgcttacattttaatagagatgaatcagttttggaatctaagctgtttgccaagctgaagctacaggttgtgaaataatttttaacttttggaatcacactgcctactgttactctaaatagaaatatagggtttttttaatgtgaatttttgcctatctttaaacatttcaatgtcagcctttgttaaccttaaatacactgaattgaatctacaaaagtgaaccatctcagacctttacttatactacaacttttgttttctggtggccaaaataccaaatgcctgttgtatttatggattaaaaactgctcataaaagcctgtgttactgctcctactcttgaagatggtaatattctacgtggtcaaatatttggactcatttaggacttagatatttcagtgtacttggttttttaatttaactctttttcacagccacgctaagggtaaaaaggaataatttccttctgtcttccttttcaagtatttctgggtaagggattcaaaaaactaaaactgtttttgtttgtaatataaaatatggaattgatctttccagggtcagagatgattaatgtttttgctatatacttttatacattattttcttatcaaactagttaacaagtatttttatatgtttgtaagcagatatgctttcatagcataccttgtgtatatgtaaagataagtatttaattctcactgttcacttttaactgacaaagaaaaacaagtggaaactacagaaactgtggtagaacttttacttgctggtctggtcttggttgtacccatctttggccagtcacataactactcaagaaaccttcccaatagagtacaacaggatgagactctgaaatcactttcagtattccctgctagatattgattgttatttcaagtattaagtgtaagcttttaatggataattagtataactgtggatggcatctgattttgtttttaattctgtggattgtgtttaagcaattcaatagtatgttcctgattttgagatgctaagtggtattgcacagttgtcactttatcaagtgtgtacaacagtcccatgaagtttatagagcatacccttgtatagcttcaggtgctagaattaaaattgatctgttatcacaagatgat

SEQ ID NO: 474 - protein, 204 aa, Homo sapiens
MAAAGWRDGSGQEKYRLVVVGGGGVGKSALTIQFIQSYFVTDYDPTIEDSYTKQCVIDDRAARLDILDTAGQEEFGAMREQYMRTGEGFLLVFSVTDRGSFEEIYKFQRQILRVKDRDEFPMILIGNKADLDHQRQVTQEEGQQLARQLKVTYMEASAKIRMNVDQAFHELVRVIRKFQEQECPPSPEPTRKEKDKKGCHCVIF

SEQ ID NO: 475 - DNA, 22965 bp, Mus musculus
acagggtctcatgtaacccaggctggtctccaagtcactatgcagcgggatgaccctcttgcctccaactgtgagctgagacaccaagcactgccgctgcatagttaacccttttaaccctcataacactcccatcaaccctcagcacttccgctttttttcttatatagttgtggcaaccatgttgtgcctgctgggcccttcaaggagagtggacagaactgaagtcacacctccactcagagctatgacggccctgactacagagcccagctttagcccggggtcctcagatggacaagagagagacacagcctgggtacctacatgctggctacgactgagacttgcacaagaggaagaagagtctgacagatagctaagtgtggtgggaccagacaaaaagggacacactatggaacttcatgatgggaaatgtcgagatgtgagggctggggaaggacatcgtagttcatagggtgatggaatgttctagaattagaggtggtgactgtacaacttagccagaacttaacacactgtgctatgtgccttagacctgcgagtgagccgcaaggcacacagatcaggaagtcacgagaactgcaagagaatgctcggtctgctccctcacccacacgctggagacaaggacaagaagcagaggttgcttccctggggctgatgctggtcagcttcaacattccaagtctgactttagaggcaacaccactatggaaaagtatctaggaaataagcctgtttctataaagcaagtgtggctcaggtccaggtgcagggagctgggattcgaggccattgaacgctacatacctatttccagaccagccctggcaaacatgagactctgtcacaaaaacaaaacaagagcttcccatgtggcaaagcctgtaatcacagcaccctggggcagaagcaggtagatttctgtgaattcaaagccagcctggtctatagagtgagaccatgtcaaaatcaataaaaacaaacagaggttgacaactatctgacagtgagcccccatggtggtcactgtagacaccagtcaaggtagggtacccagaggcaggagcccacaggcaaagagtctgtggataccagatggcccaacttcctcatagcatgtccactgcaccccaccgccatcgcacacctgaccagtacttcacagccttccagacagttctcctgacctcagactgctctccggccacagtggccactgggccacacgcttcatgcagggtatgcaggaaatgtccttggcctcccacccagtgcacactgggtattacccagttctggatagccaaccaccccctactatgaccttgggtcccctgaagaggtggcacggcagcaatcccctgccccaagcgccctctgggtgtgagactgacggttggctagtttggcacacatacagcttgtgggaggcgctgaggctggacattaacgcacactgtacaggctgaggtggcagacacctcacggagcctactgacacacgcccccagggctcgcctggcttctgtgacttcctgattcaaccccatgcctctgaccccttagacaggcagaccagcctggggcctccctgagaggtaattacttaaggcaagccaccagtttttcctctcctgtctttctgagacacagcctcaaatagcccaggttggcctttacccctggtcatcttgtcatcttgcctccctggtcccacatgcagagccttggtgcccctggtcgtccagggctgggcagcatagcagtcaggcccacagaccttcactatgactattctgcatttgcaagtcgtcctgcaggcaccgcgcacacactccaccatctctgaacaagcctcagttgacaggagcagtggctgctgcggcaggccttctcctaccgcgggccatccatctgccgcagggctttcccggggaaaactctggggagtccctccaatgctgtcaccatgctgtgtcaagcaggagctggggccaccatgagcaggtgtgaggagtcctcttgaatgtcgcaggcctggggctggcctcaaaggactataggaaggaacagccctctcagctgggtgatgcctccagggacctagaccaacaaggttctggaagtttctttcacttgtctggttcttaggttttatttgagacactgcctcagatttggccctgagtctctgtcctcctgcctcagcctcccactggctgagcggacacccccatgccaggctgctatgggtcttttcctccattttccctgtattcccaccaagacctatagacacggaagtggcagaggcgttctgtggccctcctcacagcccaatgtcctcttaggaagtgagagggtttttggagaagcaagtattttcttctctttcttgagacagtgtttctctgtcctggaatcccctctgtagcccaggctggccttgatagcctcttgagtgccaggattaaaggcatggccacttctgctggtgcaaatattttctacaaactatggggatgggtagaatccctgttaaaatcaattgtcctttgtcagaaacaaaggttctccagcacagacacctgggctggccgcagcctgtagccctcctcccctcaagacccctggtcgccgctgggcgcctcctctcaggtccaacaactgctcagaactggatgccagtactgcacggtcctcttctttgggctgtcctactgacagataagacatgacagacacttagaaccttctagaaggacaccatgaggtaagctaagactgctctcctaccccggtacccataggttcctcttcctcccctcctgaaaacaaaccaagaaaacagagctctaagtaataaggctctgacccctcccaggccagggtgcagggctcaggagcccagagtcacccacttccttccggaggtttccacatctgactgttgccttggagacaaggcctgagctagttccatgtgttcactctgtggcagggcagccccaaacctgaacatagctcagcctcaaggccacccccacatggaaaggtcactgggagtggcttggggtcagtgcctgaatcttacacccagtaccccaacaaagacaaaacaaagttgaagtgaggtctctgcacacttcctctgttgtgcttctggtcgctgctgacactgtttctgaacccttattggggtgggactgcatcctgggtccttcgaggggctcctctctgacaatgaccattttctacagggcagtaggcacagatctattttgcagatgaagaaactagggtcaattctctttttgttttggagacgaagtctcaaagtgtagcccaggctagaataggacttaatagcttccctagtgtttatttggaattgtttacaaagttgtacattctagctttctgatctaaatacagaaagaaggaaaaaactatcatcagataaccaaaggaaacaggtggagccccgcctagaatcccccagtgaggggctgaggcgtggtcagggtggtacttgactggcaggtattcaagtgttttgttcgccagacccacttgggaaaggaaaagaaggaagactctgcaatagcatggtcctcagaaaagggaaatgtgtcctttgtgggactcaactgcagagtcctcctgctctaactggttttgccttttctggctaagacatctgaagcagggcattctgagaaagccaggtccattcccaactgctggggattgctgggaacttccctcggtgaaaccacactttcagagtggaggggatttccacagccgggcctggcccaggtgtttccatggggcacaggctgcggagacgacccattgggacttttcagagtatgggggtcctgcagggagttcacggtgagctgggccatcccacctgctgaaaagcatgaggtcacatgcagaggatctgaaactcagttctgctttagctttcagaaggtgcctcacgtagcctcacaatcttcctgccccttcctcaagctgacagacttgccgcaccatgcctggcttttgaagtgagagtttgcaagctttctgagaaatgaataactgggtcttacggctttcaacatggagggggagggctggagggagctggctccaagggtgaaggcactgtcactgcctgagaaacagtaccacaggaaggaatccacaagggcaagaaactagactcttccctcctttaacttcctccagcacaaaataaacgaacaaatagataaatgcaaacgtctttgaggtttaaataactccctcagcactgcatcctggaaggagagaagtgtggtcacattctgtgcgcctcagatgccccactgctgcgaggcctggggtaggactgcagacaccaggcccttcccccagtgagcccacaagacaggcagtgtctgaccccagagtgagccctaaggacagctgcagactccagactcggtcatggaggtgttgctctgtgacccagagccagctcacctcacactcactcagccttgctgcagtctgaaaactctccctccatggcagcgctcaggaagctgaggctggaggattgagagtttaaggtaagcctgggtcacagaatgagtccatggcagttacaataatttagcaagaggttcaattacagtgaaccttatcatgcctgggtatagtgtgtgcagtgtgtgtgtgctctgagagctcttagccacgctggaccctgacaagacaacactgtctctttaaaaataacaactccggggctggtgagatggctcagtgggttagagcacccgactgctcttccgaaggtccagagttcaaatcccagcaaccacatggtggctaacaaccatccgtaacaagatctgactccctcttctggagtgtctgaagacagctacagtgtacttacatataataaataaataaatctttaaaaaaaaaaaaaaataacaactccgtacaagactgcacagagaggctgtgtcttagaaactaaccccactagagtcccaggctcgcactgctgaggcaacagactacagacctgactccagtgtgtgggaactctcggtgcgacagacagagagccagctcccagacatcccgtgccatctacacctgagcaagtgcggcacacgcatcacacagacctgtactcaacaataagtaactttacgtttcttccttttgttttgagacaggatctctctgtgtagtcttggctgtcatagaactcactctgtagaccaggctggcctggagctcacagagatccacctgcctctgcctctggggtgctgggattaaaggcatgcgctactgtgctgggacataaaatacaaactttaaattaaaaactaagccccctggcagtgggcagagagaccccttgctgttggtggtgttacatctgccagggcagtcctttgtgcatcctggcttgatgcctggcgtggtggccaaagccgtcttatgcctaggactcatgaaaaccgaaccaaatcaaatccagtctgcacagtgcagataggaggaagaccacccacagccctgccctcctgtgatggcactagagccacaggccccgtctgttccagcacagataaggatgtcacccaggggcccgctgtcagggggatcatcacaacgcgccagtctgtggagatggggggaacagaagcggagcagtgtgagcactgtggagattaacttagagatggaggtggagagccgtgaagagccactgtgaggggccagctctgccacctggggctagagtgaggtcctagcccaagggccacatctgaatctgtagttatacagtggcaggggtcggtgtcaatgtccacggctcatattccctctagagtctgtggggatgagctgctggggaccacgtggatgtccaggggccatctatacctggccccatctctcatcggagacagtattcggtagagctttggtagagtgggccctgagcttagcccagtggagctggccctggtggtaggggtgtgggtgagccagccccaagggtgtgagtgtaggagagccaaccctgccacccatctgctgggaggtaccccaggtacacaggtgataccccacctcccccctcaccaccagtggcagtcaggaaagcgacccagagggtcatgagctctggagagctggccctggccccactgccatgagctagtgcggctgtgggtgatgccgccccttgccacctgaagtggaaagggaagcagtgggtgggagagaacagggtcactaactagttctgcatgagaactggctgcagcacgcacgtgggagaatgggccctgcaccttgcctgcacagtgaagcagaagcagcctagttggggacggcttccttggtggccctttggtccctcccccaaaaggacaaataccactaaccaaaatgaaaaatctcttgcatcacacttaagaaaaaactagtgctggggggtggcgagagcagcgcatgagcatagggcgctccagcaaggcctggggtttggggtcacaagcctctggaactgcagtcctctggggatctggtggtcgctgcaccagccatacacatacatgcaggcaactcataaaataaaaacaaatacatcatgacacggtctcagcactcaccccacaggcacataggaagaattaaaacataaggaacatcaggggacccccaagggaccacagcatggaaggaagagctggctcctgtcaaggagtccaccaacctccgtaaggttgcctgctgtagcttgcacatgcacgctaaacaaatatagtagtagtaagtagtagtggggctggagagatggctcagtgggtaagagcactgactgctctgccagaggtcctgagttcaaatcccagcaaccacatggtggctcacaaccacctgtaatggggtctgatgccctcttctggtgtgtctgaagacagctacagtgtacttacatgtaagaaataaataaaaatctttaaaaaaaaaaaacagtagtggtagtcgtaatgcaaacatcgatagctgggcagtggtgcacacttttgattccagtactggggaggtagaggcagacagatttctataagcttgaggccagcctgatccacacagcaagctccagctccaggatatacatagaaccacatagagagcccttgtctcaacccctatccctaaaagcaggaagtcaccacacctttgagtgatgggataaatgtcttggaagcctctagatctctatgagcgccaaatacagttttaaattttctggtagcctcataaaagaaaaaaaaagagagatgaaatgtacaacaatattcatatttttgctaatttatgatgtgttctgccccattgtaaagccattataactggatatatccattcctgcagttctagttcttgggggggctgaatcaggagaacttgacacggtcctgggctaccgagggagtgacaagccagctgggatgtgtacaccgctggagccatagctctgtgcgtaagagtgctcggctgttcttgcagaggtctgggattcaggtccctgcactcacatggcagctcacaaccgcacgtgacaccctcagaagaggctcctgtaggcaagtggcacacatacacacacaataaaaactacatttctcctaggtaagaggcatgccattcacacagtgccctgcagtgtcgtcctggtctcagggtgacactaaggtcggggatggggggctctgctcagtccacatctctgatcccagacagataaatttcaattcaaacatatgtttctatcacgttcactccgccctaacattgaaattaattctactttggggtagggcttatcacccccctcctccaatactggggaggaacccaggctcatacacaccctaagttaatgttctgctcctgagccctcactgggggaattctaggcggggctccaccctgattacacccccagccctgttgctctttttttttaagatttattttatatatgtgagtacactgttgctgtctttatacacaccagaagagggcatcagatcccattacagatggttgtgagccaccatgtggttgctgggaattgaattcaggacctcaggaagagcactagcccccttttgctctttttgaggtgagatttcactaagtgtcccaggctgcccttgaacttaaatggcactggaatggatcaagatggagaaaggacagacatcaagaagccccaggggtggaactctctagccttgtcacctctgctgttcactgagttctaaaaacaagcccaggacaggggcggttaaaacctggttttcggaagttctcaggttatctgcttctgcctttgtcaatggttaagtctgtggtctcttttgcatcctgctgcctccagctagcacctctctgaagccccatcacttacagagctagtaaccacttcctccatgctgaaggaagagctggctgacctgagagtcctacctaactgtcccctgacactcccacccctagttcctgagctcccaactctgcataacggtagcaaatcagaaaccaaagttacaaggatacacgtggagctctggaataataattgccctgccttaacactatgccaacctctacttgactgtaggcactttattctatggagcctagggaaggggtggaggcaggagggaagagaaaaggcaaagttattggcgcagacctttaatctcagcgttcaggaggcacaggcagggtgatctcgctgagttccaggatagcctgggctaaatataaaaggaaagaattaaagaaaagaaaagaaaagaaaagaaaaaagaaaaagaaactgcggccaaagttaactttctgtgatctgtttttgagtctctccatccagcctttcaatggcttatttaggggaggccgaggagtgctgaagaggcagaagtagggatagaacccagggctttctacacacaaggcaaatgcttcactccagagcaagagcccagaccttcaatgaagtttaacagaaacgtgatcatttcaaacaaatgagtcagcggagatgggaaggaggatcctatccagccgctggaggctagcctgtgctatctaggacctcaaatattaaacacgcttttgatccatgacgcttcctttctccctccttttgacagatccaggtccccagcgcccactctgggccggtcgctggacactgtcaccctgagggatgaagtcccgctgcccgccgcccgccttggccctcggaggacccacctggctgtccggaaccgtctctcgcttcgcccagtctccggccgcgcccgcagagggacacgcccgcggagggacacgccgcacgccccgcccaggccgcgcccgccagccggatttacttcccttaaagggaagcagcccggatggaggtgtggcgcccgagttcggaggatcacggtgtgaaaggcaggcggcactccgcgcccctggagaccaggacgggcgctgctaattggctgtagtggagcggatgaggggcgggacgagccctccctcgctggctcgggaactggcgccagcccaaagcgcatgcgtaaggcgctgtggatggggtggagcctggggacagactggcattaccagttgccaattgtaactggagagattcagttacactctcctggggagatccagtagagccagccctgggacagaagtccggatggcggtggggtgggtgtggtgacaggctagaaaggggtggagccatccgtgggcggtaccaggcctgtaggcggaaccaggcctgggacaggagtctaatcggggcctggccaggtaggggcggagccatccgtgggcaggcgctgtcttttttttttttttcgagacagggtttctctgtgtagtcctggctgtcctggaactcactttgtagaccaggttggcctcgaactcagaaattcgcctgcctctgcctcccaagtgctgggattaaaggcttgcgccatcaggcccggtgggcgggacatgtctaagcggggcgggaccagagttggaagcatgatcaggcccgggcaggggatggcgcggccagggtccacagcgcgagctgttggttggtgcggcgtggcagggcgtggcgcgggaggcaccgttggttggtgcgcggctggagggtgcggcgctggcggcgccgatgtttgggcaaggcaggctgggccaggccatggccctgctgttgtttctgggcatgacagcggcgctggcccggggctgcctgcagtgcgaccccaatttcgcggagaagttctccttctatcgtcaccacgtgaacctcaagtcgtggtgggtgggtgacattcctgtgtcggggatgctgctctccgattggatccagaacacgatgaaggagctccatctggccattcctgctgagatcagtgagcggcggaacccattccagggtcagaagagcagcagggaaccgggcagggccactcatttgcttgctttttcctcctgcccttagcccggaagaagctatatcaagtagcagaagccgtgtaccagaggatggaccagctgtaccaggggaagatgtacttcccaggtaaaaagagaaacaggtggggccggtgcgagctgctacgcacctgaacttgaccgttctgctgtgactctcacatcagggtatttccccaatgagctgcgggccatcttccgggagcaagtgcgcctcatccagaacgccatcatagagagtgagcagtgggctccacagaggggaagatgatcatggccgctggcacttcagggctaggggcactggaaacagggctcagggaggagtgactctgcaggaggcccttttgcataaatgtttgctagcatgcccatcacccccttatttctgtcaaactagtctcctggtggcacctaggaacaatggaaccatccttcccttaggttatccccatctttcactgcaactgaccccttcctacatccatgaaactcatgtagcacaagcgtgtaatcccagcactcagaaatgagggaacgaggcaagaagattgccacaaatcacaaggcagcctaggctaccttctctgtgctagggtatcctgggctacaaaaacaagtggggctgaggtgttgagctctgggccttgtcagaaagcactatcctgttatgtcctcccctccccaggccgcattgactgtcagcgtcactgtggtaagtgaaccatggtccaggctaagggccacagtggcagtggcccaggctggggagggcccaggggagtctggggctgcttctcatatattgcaggtatctaccagtacgagaccatctcctgcagcaactgcacggactcccacgtcatttgctttggctactactgcaagtatggctcatgcagcaatcccactgcccctggggtcctaggcaaggaaggggaccagggccttggggataccccaccaccaagtcttgtgttccccccccccaccccaggtcatcggcacagtgggagtcagctgtacagggccttctgaaatacatgtgagctggggcttattgggtaccaggacatggagagggagacaccaagggaggccacttggtcccctgactccaaacctactgtcattgtagaaacacctggcacaagtaagttcctgctggaatccaaggttgtgtgtgccttatgatgaggggttgaagcttgccaaggctcaggaggaccttgcccacacccttcaaaggtctccaagttcagctggaggaagggggcaagccatcctggctgaagggtcttcatgaaacctattcttccctgaattggtgtggtggcagacctggagggtctaactggagccccattctatttcagacaggatgaaaagatgaggtaagaccaggccttccacttgagagggaggagtgaggtgaggagcggggtatggggagtggggagagggatggagtgaggaggtgtgtgggtaagagtgggaggggatgctgggcagggtgggtaagagcgggaggggatgctgggcagggctgtgtgcctgagggcacactggccatctgtagtcacacctgcctgtgtggtcaacgcactgcctgaaccatgctgtgtttcttccctgcggcctcaacttggatgtgcagaaccaccccagccttgtgagtgagctggggaataaggctacaaagaagcaggtgacctgtggaaaacagaattccaaagtcaagtggcctctttgccacagacctctcatgccctatcgaggcctgtcattgtgggtgctagggagggtccctatcccactggcacactttaggatttaagaacaggcagggactaggtgtagcaatgcattcctataatcccagccttccaggagcctgaggcaggagaatcttaggggctagcttggactatattaatgggctatgggaggcagcctaggaagggaggcaggagggcatgtgcagacaatgggcttagagcacctcctcctcatcccccaaagcctgtcacaaaacataaagtgtctggaacctcagcatctggtcaacctgaccttggaaaaagtctctgagtgtctgacccagcactgacagtggctgccagcccccagcctcggcagaggccaggactcaactgcactgttgcctctggagaagctagctgctgcctgcctcaagttacccctcccactcccatggatcccaggctgggccgggacaggggagggcagggagatgggtttgtgtaagatagtggggaaccccccagggcagggccctctgagatattttgattaaaatgccctgacatttctcatgaggaacaattctttaactgccagatctggctaggtcgttaatgtagctggtggcatgcatttcacctgaacatgatgtacaggtgtggaggggtcctacgctcctatccacagagggagggaccaaaaaacctggctggtacctgcaacatctccctcggggtccaaggaccctgggtaactatgggcagggttgcagaagggatgcttcagctcttgctgaggtgggatgccaagtactccagtatggcctggagcatgccatggagcagatgacttggcctcctgacggtcctgcctctacaggcgtgctagctgggtcttcctgcactgcacctgtctgtagactgaccttgaattctctcagcctcaggatggatgatacagtgggctttgtaaaagtggagcaggttagtgtgtgatccaggtcagagacacagctggaccacactgcagagagcacctagcagcagagataggctggctgggagaagttgatgcaggagacccaggggttcctttttgttttggtgtccttgtcaccttggtttccttgtcaccatgtcccctggccccaggcagaagcatttccaggcacattcctacagttcttgctcatgggacaggcagcaagttagttttgtttttaacaaggactacacatggcagcatctagagtccctccttcctccaatggactggaagagcagtctgaacaggatgaatagggacactaggtgttgtgttgggaactccagctgcactctgtggccagtcatcaaccacagcaatgggtacactgtagctaccgctgctgctgaagactacctctgtgggtcctggctagggctggcaggatgcttgaagcagtgagagagtgctgcatggtctcagatggggcactggatgaggccttgggcacagcagcatttggggacttcagttgcagttgagtttatttgaaaaggagtcttcctttttccccatcaacgaagtggcagtgagctgccgagatggagcaagggcctttttcaactcaagttcctgctctcccccctcacagccacaggagcagttagaatgctgcggagtggaaaggtagctctgtggttaagactcttgcagaggaccccaggttttccaatatagggtggctcacaactacctggagctgtagttccagggaacccagagcattctcctggcacaaggtacagacattttttttttccctttcaagctaggtctctatgtcaccttgactatcctggaacttgctctgtagaccaggttggcctccaactcagagatccccatgcctctggctcccaagtgccgggattaaaggtgtgtgttaccacaattttgaattctagcatggcaagtggagattggaggtaatgatacaggacaactgtcttctggttctgcactcacaccaaacttgtaatccccacacacaaggcacctactggtggaggttggagaaactcactggtctgtaccacctgagcttcaggagcctaaatggcacactggggactgccctggggtaccatggggacacaacacacaaatgttttttgactctttaatgggtcattgtgacaccgatcgtcagcagcgtgatatatctctcttcacatgggaatgtcaacagcaaatcaatcatggaacatcatagagctggaaggtcacatggggtcggtaagagtactctacatgctaaagtgacagttgtcctcaaaggaagccagaatgtctgtagaccactgtcacctctgaggaaggctcagcttgtgcccagctacccagttagatgtctcttcaccttacccaggaacagctggggaagcactgactgctcccaggatgcacactctccactgcaaggcactaagccctccacagctgcagggacaagcccatgatgtgtagtgacaaactgaggcatacattgcactcttccactgacccccacaacagaaccccaagacagaccacagttctgttgaacagaagaaaatcaaagggccatccctgttgtctgcagctgagctgcggagccacccacaaggacacttcatccatctgaccttgcaggctgtggggaaaagcattaacagctggccttatcacctctccatagaggctaccagttggaatatttgtggacagcagcatctggaagggttcctccagaggcagcatggggtcaggagtggggccacatcagtgtgtttgctgtaaccctgcagtccacagccgcctttgagaatgggaagtggagcagcccctttctggctagggtcaggatggccttccttgctaaaggagtgcaggtcggaataaaggataataaaagaagttgatgcaacataggacctcagggtcacacagtggaggccggtggtgttaaattaatgctgggtgtgagacagtacacacaacaggagaggtaagacgcatcacatctttctgtggtctgttgcacatcctggactgcaactcagcactgagccaacgtggtcttcatttcctccagcaggctgctgagcaacgtggcatcgctgcacttcccatctactgacacggagctctcgccctaggggatggcacatgcacaaattgcctatgtttgtgtgtgtgtgtgtgtgtggggggcgcaaatgtcacctctcctaccctccctggagcctagacctcactttatttttttgaagctatgtagccccaacttgcctggaatgcagtaaccctgcctctgtctcctgagtgctaagatggcaggtaaatagcatacagcccttcagggcgccggagacagttctgagcccactcttcccttcctcttgccttgtgttcccaaaccagatgcatctggagggcctggtagaactgtgagggttggtacagctcagctaggaggtctcgtctaactgtgggagatgggttgtactcttgggatggggaccttagaggacagccctggacagggaggtatgtgcaggggaaactcagcctcttgttgagagcatcctgggtggctgcagagcagcaggcactgctgtgagctcaccttcttcaccagcaggcagacatggtggccctggatagagcggctgtacatggaggcacaggagtctactcgctccacaactgcaacagacaggggggtcaggtccatgctccctggcaggccctctccagccagaactgccaggacacggctggggcccatgctgtgaaggcactcaggctgcaggcccaggcctgatgcagcaagggtctaattaggggtgggaaagtagcttctgtcatttttggtacaaagccaccaagagtgttatcactgtaacattgcttaccggaaaaatggtggtagaagcagatctttgccagaagattctggaaagacatactaatgccatcgactttgatggagttcatgctcaggtctcctgactctagcaactttgcaaaggcatcgctgtgggaggacagagagtgtgtgatggcagggcctgggtgtcagcagtcacctggcattaggaatgtcgcggcatgagggcagcttcaaactccaaggcagcctgggctacctacatgtgagcatcagaaagtgacaggcacacagggtagtcctccgggacagagaggcaaccatctgcagtgtcacctgccagaagaggtggcctcaggtggaggcgacgcctgtgatgaaggctgagcactctcatgttactcctacctcacagcccacatcagcaaactctacccctcctttcctcccacgagctgtgtggtggggtggagacacacctgtagcagggtgtggtgatcaggtacgagctacagctgaaatgcagccggaagtccaacttctcatgggtggctccttcatcatcctgcaaggagaaaggctgtagggtggactttccaatcaggcactttctttcctgggatgcctgacatcccctggggagcgggagggacctggacctcagcatagagtgcataccttggcaatgaaggacagtgtgcctttgagcttctgggccatgacgatgctctgaatggtgaacacaaactgggcctcattggagacgcctgctgggagacatggcactcagtgggccagcactgaccctggggtgtctgtcctagctgggtgggatgctagagtgacagaaacaatgggcactgctgcagctcagcccaatggcccaggtggaagccagcatgtggcccaagagtagcaccgagacacgggagggtcatcaagagcttggggcctttcgcttcagctgtccctgggagctctagttaagtccattgtgaagagccaaggtggcgtgacgaaggctagggccgaagggtaggctcaccgggaggcagttggaaaggcacgggcacaccgtcgtgtaccgatgagccctctggcctggtcatcttggtgttgagagagtccagcacgttgagctccatgttcttcaggaagctgctgctctggttctccaggatgatggacacagtcacttggctgtccttctgtaagctggcttggatgtcatatgtctgcatgagcaagggcagggtcaagggccagggaccagctgaggggagggagttcactgccaagatcaaggacagtgaccccaccccacccccgtgaaaactgcctgtgggccccaggccctcaaaacgcactcttcatgaagctgcaccccagttcctgtctttttgactccttgagacaaagtcttgtagtgcagcactggttggccttgatcttgcaatccccctgcctcttcccaaggtgtaaggtgtatgctgcccagctggtcgctctgtcttgctagcaaagctgtcctctggtggcctggtcatactggctctccagctgtggctgggctgcagagagtgccctatactgatgcttgagcttggtgcccggctactgccgccagccccacaaggcttctaaggatgggtctgctccgccaatggcccgccctgcagcaacccaagtgtcacttaccactttaatgtagggactctcagccagaaggcagtagctggacatgggctggggaggagagacaggctcgtcagttgtgggcgacagggactaggctacagaaccatgcttggggatggccagttcccaaaacatgagccaccagatgttgcgggtcatggatccctcaccaagcacaggtcacaaagcagcttgcacggacccctgggtcctctccaaacagaacccaggtgacacccttgggttggcaggttgtcaagaatgctcaccgggataggctcctcctcctcctctgctgccgcaccattctccagaggtgccacctgcttcttcttagctttcttcttgtctcgtggcctctcctccttctccttctcctttctgtgtttcttcttcttgtgccgggatgatttctgaagcagagtctgagctgaggccccatgtctcccacagaggcaccctttaatcattgtctcccctcacactacatggtgaggtcctcaggggagcagataggacagtaaaaccaggaattgcacaagtctccacggctggaggaggccagccctggcagacactagaaccttggggctgacagatgagtggcaggagcagagtgaagaagattgcacagcacagatcagcaagactgtcactgcacaggaaggatagccctattggccacaccacgaggaagaaacactcagcagtgtgcctatatttgtatcatccaggggcaaatggactagcattatggctggctggctgacagacacgaggcccagtcccacactggagcaacaacacatggccacgagtaggagccaggctccaacaaagcacacatggagacttcaacgtggggcttggggcgaaggttgatggctttgtggttaagagtgcttgctgttgaatcacgaggacctcagatcctacaccacacacaaccaaagtcaactttaaaaagacaaaataaggggctggagagatggctcagcagttaagagccactcttccagaggtcctgagtttaattcccagcaaccacacggtggctcacaaccatctgtaatgggatccaataccctcttcaggtgtgtctgaagacagctacagtgtactcaagtacataaaataaataaatctttaaaagtaagtaagtaagtaaataaagagcaagagaggctctcactgagagccagacgttagagaccactgagtgtgagactccctgtcaggaactgtctagaacaggaacatctagagacagcaagtaaatgtgagatgacctgggtgatggaaggttctggaatgagatggtgttgtggtgcactgcttagaaactgcactggaggtactatatccctttcagaggctaaagcatgaggactgcagctacctcttttgtttttgtgtttttttggtttttcaagacagggtttctctgtgtagccctggctgtcctggaactcactctgtagaccagggtggcctcgaactcagaaatccgcctgcctctgcctcccgagtgctgggattaaaggcgtgtgccaccacgcccagcatgcagctacctcttgaggacaccactactgtgatcccttgtgagcaggcctactgtcctggggttcaggcacaggcctgccaggggccccttgccacagccttggggtggatcgtcttgtgcctcaccctttcttggtcatgatccacgtggtcctcctcttcccctttgagaacctcacactcatccttaggggaggtgatagtgcttgcagcaagttcttcctgttatcaggagggtcagagtcagcttttggggaggggtgtagtggtattccagactgttcatgggttccagctttaggagcagtaagagaactttgaatcccacataaccagtgctgttccacttgagggctggggacatcctccaagggatgccttggggacaaacgtcctgctggctacccctctgcgtcactgaaccctggcaagcacagagtctcacaggatagcagacatagaccacaaagtacagaaggcgagcccaggaggcttgactccagtcatttactggcacttgtgtgtggctctgattgcaggggatgcctgccattcgctggctcctggggatacaaatgagaccctgaggacacacggagcaggcacttaccgtggacggggcaggaatgggggcagcagcaggtggtggggtggtggacagccagaagtctaagtcctcaccctgaagccacaagaaaaggacttttggcaaaggcaaggaataccagggacacgggctgatctccagtcagttgccatcctgtctggtgctcgctcaccttcttgtccttcttctctctctctctctctttggtcttcttctccttcttcttgggcttcttgctcttcttctctaccccgagcacaccctccttctctggggacttcaccgcctccgcatttctatgtttctggacaggcagcttctcactgtcagccaggggtcttgggagaggaggagatgtggtgtcactgggctgagctgtggcccacccctgtacagctggccctatggatcccgaggctccagcaagtgtccacgacagccacggtgccaggagcccgtgccagaccctgtgcccttcccaagtgccccagtgttccctctcaattcttttgtatgtgacagtgtatgtccatgctcatgtgggatgtgggtgtgtacaagttgctgcacacatgtctatgatcacatggagggcagaggtggatgtcaggtgttttttcctgcccctctccgctttatcttttgagataggatctcttactgaacctggagcttcctaattcggccaggctggcagccaatgaactccagggatcattcagtgcctcagctgctagggtttgatcttaatgagtgctgggaaataaactcaggtgctcatgctcacatagtaggtgctattctgagccactaccacagcacacagcacctccccacccccaaaatgatcccaagcccatgtactttccaccttaggctaaagactctcagcgccctgggaacaggaacctcaccaccccaggcacaagctcacccagcagtttgttcctcacccctcacttacttatccaggtcaatgtccagcgccctgtaggggtcattggggtctttgtcatcctcgtcactaggcaaagcattctaagggaatggagaggtcagggttcaactaacaaccacgggctctgctggaggctcctgtcccttctcctccaaataacaactgcccagtcacacccatatccatactacatgtgccaggtgcccagtgtcctgggctatagctcagcctgggagcacagccttcagtggcacacacagctggggctgccagctcaaagagtggagtaaaatactgcccatcatggagggcttgtgcaacaggtcaatgtgtggctatctacacgtagggagccttcccttttagggacacacagacaagcccgttgtaaccaaggctaaaagagctgagaaggcactaacctctggcatctcctcagtgataatgtccacacgctgggcaggggcaatgtcctcatcgctctccgtggggagagagctgtggcgccgcttgcccttctccttcttcttccttttcttgtccttctccagccgctgccggtgtcgccgctgctcctccagcttcacatactggtctgacatgggcatacctgtagggaagtgtggatggttacaactcagggaccaagaaccccatcaggtcctgactatgagcttagagccagcagacacttgcctggaactttcagaggcactgagaggtcgatctgtaccacaggaatgtgttccacacctggtgcatcctggtatcgctgaaagaagagcatagggtgtcagtgaacctcagggactcaggaggaaggaagaggggaccctgagagtaaggctcccagtgcagcctgggagcactgcccataaggtaagctgcaggctcacagagaagagcagggccctgtcatacagttgtgaggaagcaggagctaactgtaaccttgctacagttagggttaaagccaaatctatccatgatggtcttttctcttttctttttttttctcttctcttctcttctcttttctgtccttccttggacacagggattttgggggcacatagtttcgcttaaaactatgtagccaagggcaacggtaatagagaattccatctctacctcctgactgctgagatgaccacacttggttgaggtggtgctgtggatgggacccaaggttcatccatgctacacaagggctttacccaataccactgtagggtccgcccacagaagctgaaacctccttaggaacatgaggatctaacaggccaggcacctgtccacgtggatccagcacttcccgtgggtacaataagccagctgggtagaatgccttcctcaaggcagtggtcactgcccctggggcctcatctaaaccattcagagctctccatcaagacctggatgcagcatagccctgctcagctacagctgagactacccaggcacaaacccccgccccacaaggcactgccatgattacatcattctcttaggcttcagcttggcagctggggagggatgctcaaggataccacttgccttctgcggggatggggagctcttgatgtagaaggggttgttggcttgttcctgcttccgggcctctcgccgctgtgggaataggactgcacatgagcatgtgtctcagagacatgcccatccagttcccaagaccctaggtgggcagggaggagccacagtagaagtgtggttcccaagacctccaggggcagagctcacgggtgggcagactgcctgaggttcctgcctcctgggaggagaaatggcctggtctgcccattctgagcctcagcc

SEQ ID NO: 476 - DNA, 2252 bp, Mus musculus
tgtgtagtcctggctgtcctggaactcactttgtagaccaggttggcctcgaactcagaaattcgcctgcctctgcctcccaagtgctgggattaaaggcttgcgccatcaggcccggtgggcgggacatgtctaagcggggcgggaccagagttggaagcatgatcaggcccgggcaggggatggcgcggccagggtccacagcgcgagctgttggttggtgcggcgtggcagggcgtggcgcgggaggcaccgttggttggtgcgcggctggagggtgcggcgctggcggcgccgatgtttgggcaaggcaggctgggccaggccatggccctgctgttgtttctgggcatgacagcggcgctggcccggggctgcctgcagtgcgaccccaatttcgcggagaagttctccttctatcgtcaccacgtgaacctcaagtcgtggtgggtgggtgacattcctgtgtcggggatgctgctctccgattggatccagaacacgatgaaggagctccatctggccattcctgctgagatcacccggaagaagctatatcaagtagcagaagccgtgtaccagaggatggaccagctgtaccaggggaagatgtacttcccagggtatttccccaatgagctgcgggccatcttccgggagcaagtgcgcctcatccagaacgccatcatagagagccgcattgactgtcagcgtcactgtggtatctaccagtacgagaccatctcctgcagcaactgcacggactcccacgtcatttgctttggctactactgcaagtatggctcatgcagcaatcccactgcccctggggtcctaggcaaggaaggggaccagggccttggggataccccaccaccaagtcttgtgttccccccccccaccccaggtcatcggcacagtgggagtcagctgtacagggccttctgaaatacatgtgagctggggcttattgggtaccaggacatggagagggagacaccaagggaggccacttggtcccctgactccaaacctactgtcattgtagaaacacctggcacaagtaagttcctgctggaatccaaggttgtgtgtgccttatgatgaggggttgaagcttgccaaggctcaggaggaccttgcccacacccttcaaaggtctccaagttcagctggaggaagggggcaagccatcctggctgaagggtcttcatgaaacctattcttccctgaattggtgtggtggcagacctggagggtctaactggagccccattctatttcagacaggatgaaaagatgaggtaagaccaggccttccacttgagagggaggagtgaggtgaggagcggggtatggggagtggggagagggatggagtgaggaggtgtgtgggtaagagtgggaggggatgctgggcagggtgggtaagagcgggaggggatgctgggcagggctgtgtgcctgagggcacactggccatctgtagtcacacctgcctgtgtggtcaacgcactgcctgaaccatgctgtgtttcttccctgcggcctcaacttggatgtgcagaaccaccccagccttgtgagtgagctggggaataaggctacaaagaagcaggtgacctgtggaaaacagaattccaaagtcaagtggcctctttgccacagacctctcatgccctatcgaggcctgtcattgtgggtgctagggagggtccctatcccactggcacactttaggatttaagaacaggcagggactaggtgtagcaatgcattcctataatcccagccttccaggagcctgaggcaggagaatcttaggggctagcttggactatattaatgggctatgggaggcagcctaggaagggaggcaggagggcatgtgcagacaatgggcttagagcacctcctcctcatcccccaaagcctgtcacaaaacataaagtgtctggaacctcagcatctggtcaacctgaccttggaaaaagtctctgagtgtctgacccagcactgacagtggctgccagcccccagcctcggcagaggccaggactcaactgcactgttgcctctggagaagctagctgctgcctgcctcaagttacccctcccactcccatggatcccaggctgggccgggacaggggagggcagggagatgggtttgtgtaagatagtggggaaccccccagggcagggccctctgagatattttgattaaaatgccctgacatttctcatgagga

SEQ ID NO: 477 - protein, 256 aa, Mus musculus
SGPGRGWRGQGPQRELLVGAAWQGVAREAPLVGARLEGAAAPMFGQGRLGQAMALLLFLGMTAARGCLQCDPNFAEKFSFYRHHVNLKSWWVGDIPVSGMLLSDWIQNTMKELHLAIPAEITRKKLYQVAEAVYQRMDQLYQGKMYFPGYFPNELRAIFREQVRLIQNAIIESRIDCQRHCGIYQYETISCSNCTDSHVICFGYYCKYGSCSNPTAPGVLGKEGDQGLGDTPPPSLVFPPPTPGHRHSGSQLYRAF

SEQ ID NO: 478 - DNA, 35478 bp, Homo sapiens
gctaacatggtgaaaccccgtctctactaaaaatacaaaaaaataagccaggtatggtggcacatgcctgtagtcccagctactcaggaggctgagggaggggaatcacttgaacctgtgaggtggaggttgcagtggctgagatcaaacaaacaaacaaacaaaaaaaccccagaaactttatttacaaaaacaggaagccaggccagagggctgcagtttgctgatccctgtcttatacagactgggacactagaaggaaagttctggaatacagaaaaaaagaaaaagaaaaaagaaaagaaaaagaaagaaaaaagaggaagaccccactaccatctttagagccactgagtatgcaactattaattttaaatttagcaaaatgtttaccagtagcaaagcctgaaaggggatgcacaaaaatgaggaagttatgtgaagatgtttttagtctttttttttttttgagacggagtttcactctgtcattgaggctggagagctgtggcgcaatcttggctcactgcaacctccacctcctgggttcaaacgattctcctgcctcagcctcctgagtagctgggatcacaagtgcccaccaccatgcctggctaatttttttttttcccctgagacagagtcttgctctgtcacccaggctggagtgcaatggcgcgatctcagctcactgcaacctctgcctcctgggttcaagtgattcttctgcctcagcctcccgagtagctggaattacaggcgcgtgccaccatgcccagctaattttttgtatttttagtagcgatggggtttcaccatgttggccaggctggtcttgaactcctgacctcatgagctgcccgtcttggcattccaaagtgctgggattacaggcgtgagccaccacgccgggccttaatcttttcttttctttttttttttttttgagacaggttactggctgtcacccaggctggactacagtggcgtgatctcggcttactgcagcctcaacctcccaggcacaagcaattctcctgtctcagccccctgagtagctaggaccacaggcacgcaccactgtgcctggctcatttttttcattttttgtagagatgaggtctcactatgttgtccaggctgttctcaaacttctgagctcgagtgattctccctctttggcctcccaaagggctgggattactggtgggagccacctcgtccgtccatttttaaccattttttaaagttgtaagagagtggtggctcccacctgtcatctgaatactttgggaggccaaggtgggaggattgcttgcatccatgagttcagaccagcctgggcatcatagtgagaccccatctctacacacaataaaaaatcagccgggcgtgctggctgtggtcccagctactcggaggctggtggggtcccgctctcacatcaggatccccacatccatacagcgcccagcagcctggggaacaatgcagcctctgggcaggttccagtgccaggccctgaatcacgggcacccactccactgctggtccccatcaccgagtcacaattgtgggccccaatttcaagaagcaacattggcttcagggatgtggaccccacaccgaggaatctggtccctgggttcgtctcccgataaaacctggtaacgtggaaagcagacaggctagggcagatgcagaggtacccggctggctacagaagtcgggtggaatctaggcaggtgcggtggctcctgtctgtcattccagcactttgggaggccgagacagggagatcacctgagttcaggagtttgagaccagcctggccaacatggcaaaacctggtctctactaaaaatacaaaaattagcggggtgtggtggcacgtgcctgtaatcccagctactcaggagactgaggcaggagaactgcttgaacccggaaggtgggggttgcagtaagccaagatggcgccactgcactccagcctgggtgagggaggcagactccatctccaaaaaaaaaaaaaaaaaaaaaaaggccaggcacagtggctcccgcctgtaatcccagcactttgagaggctgagatgggcaaaccacatggtcaggagatccatcgagacaatcctggctaacacggtgaaaccccctctctcctaaaaacacaaaaaattagctggacgtggtggcgcgtgcctgtaatcccagctacttgggaggctgaggcaggagaatcacttgaactcgggaggcggaggttgcagtgagccgagatcgcaccactgcactccagcctgggtgacagagtgagactccgtctcaaaacaaacaaaaacaaacaaacaaaaaaagtcggggtggagtctgcttgtgccggctcgcatccctttcataagggacactgagcggcgctctgggacacctgagctcaggacggtgaaggcggagtgagctggacgcggggcggcgcggaggaaactgcacctgtcgccggcatttgttccgtgggagaacgcaggatccctcccagctacctcaccacttgtcccatcagcagggtccccggggcccaactccagccggggccgccagctgctgggccgaccgcaagcagtcagggtcctggccccggaagggttcctctgccacgggccaccagccccaccgtaaccgcacgccctcagccccaagcccgcgcaccagtggctccagctccttggtgtcgatgaggccgaactccttgacgaaatagtagaagtgcttgtagcaggtgttcacgtgggcctcggagcccatctgcgcgatgcggtcaaagtggtggatgtagacgtgcacgaacacgcggaacagccgcgacaggatcttccgcaccgtctgcaggaagttcttgggaaacggagtgcctgcagggagaggggtgggacgggtccacggactcagccaagtccatgtccagaaccctttgctcctggatgtgacaaggggcttccagacagaaattgctggcagatcgggcgcggtggctgacgcctgtaatcccagcactttgggaggccgaggcaggcagatcacttgaggtctggagttcgagaccagcctggccaacatggagaaaccccatctttactaaaaaatacaaatattagccgggtgtggtggctcatgcctgtaatcccagctactcaggaggctgaggcagaagaatcgcttgaacctgggaggtagaggttgaagtgagccgagatcgtgccactgcactccagcctgggtgacagagtgagacactgtctcaaaaaaaaaaagaaaaagaaaagaaaagaaaggtacgctgtactctggagggacgtgccctaatgatcatcctcaaacccacgtttatggggtgtccctgagagccatgcagtgcattacacatcgagctgggcagggggtcccgccaacggggtgatgatcctggtgggcccaggggctccatggcagtgattctgaaaccactgagaacactgggcccagcactggcaggggtgcttgtctcctctgcgaaggactccaggcctgatgctgatcctgtcattctctgctttggggtgaggagacaggagtcaccaggagtgattcaggatgaaggggggctactaagagcagcccaacttaggagaatactcagaaatggaatcctttttttttttttgagacagggtcttgctctgtcacccaggctggagtacagtggcacgatcatagtttactgcagcctcaacctcctagcctcaagcgatcctcccaccttagcctcccgagtagctgcgaccaaaggcgtgtgccaccatgcctggctaatttttaaaattttttgtagagatgggatcttgctatgttgcccaggctgagctcaaactcctgggctcaagcgatccctgggctcggcctcccaaagcgctggcattacgggtgtgagccactgtgctcggcctccctgacttttctggaaggctctgtatccccgagcccctgccagctctgactcaccaacgttggtggggaagaggtcctcgttgttgatctgcgcctcgatccagtccatcagcaggtccatgtacctgggcgcggagagtgccgtgggcttccggaacttatgctcatcctgccagcggtactcatacttggggccccccgacatgacggggcaggactgctccgtgcagccgtcgctgatggtgccgtagatgaggttgacgcggttaaagaagtccaccacgtgaacagccacccagtcgttcaggtcctcgcccgggggcaactgcacggccagccgcaggtccagcccggcgttcagcgacgcctgcgccttcttgtgcagctcgaagcgctgggtgcctggctcaaacttgcgcttggggcggaatgtcttgtccttgttgaagacttgcttcaggaaggggttggacatcttggtgacgcctgctctcctggacttctgtagaggggtcctgggccagctggctgggggtgctgaccaacccgagaggccacgaaacactcaccaagccccacagctctcccgcggacctgaaatacacaggggaatcatgacctgctggaggcgacagaatttcccggaaactcgtgctgagggcacaagcggcaggattttgttttgttttttgagacagggtcttactctgttgccccggctggagtacagtggtgccatcacggctcactgcaacctctgcctcccaggcccaagcgatcctctcaacttagcctcctgaatagctgggactataggcacacaccaccacacctgggtaagtttctttatttttagtagaaacgaggtctcactatgttgcccaggatggtctccaactcctgggctcacatgatcctctcacctctgcctcccaaagtgctgggcttacaggtgtgagccactagtggcagggttcaaaacatcccctggacttttgactttaaggagtttcacccaaagggggccacctcctcagtggacagaagagaactgcgcgtggcgaggcctgaccgattcacagcagaaggtgcgcagagccgggccccaagagcccgcaggggccgcatcttccccggtgccgatgcctggcccggacctagacttgctgctacccagcactgtggggcttgagtgtggggcaggctgagatgccggtcacaggggactgcatggccggactacggcctccacaaaggaagccacaccgcaatgcccgcagcctgtgcatggcagcctaggtggaagaaggtctcaagggacgtcatcttggattccttgggtggccccacagtcagtgacaaacatcctcaggagtgaggcagatacgggggagacggctgtgcgaggatgcaggcagagatgggggtgctgcttccacaagcgaagggtcgcccaggatgctggccaccgccaggagcagagagaagcctggcagatgcccctcggcctcagagggacccagccccgcccacaccttcgtctcagacgtgcagccccagaactgagaatgagtccctatcgtgtcagcattctccccatgttgctgtgcccaagtcactggtcactgggtcagggaccccacgattgggtgacccctcttcccttgatttcatccacaaagacccccttccaggtcgggtcacatggcgagatgccgggtgattccaggggcagctgtccaccccaaggcaccgtataaatgaggaagcctccaggagccggcccaagtctcatgcacgcctgagcggtgacttgtgagacacccacgggttgctctggggtggggacccggcgtcctcctactcccctgagaattctcaggggacagagacagagtccatcccgcacagggcggaggggcgacctggatcacacaccgcgcgtgtgccgggctcacgctcaccacgcagggcctgtcaccgccaacaccgttattgtcactgccaggacgccggcaccgtggcaggcccagagtggatgcagaccccaccctgctctgctgggtgcaccttctggacgggcagagacttgactgtgacacttggggcaaggcccacgcagggtgctgggcagggcgggggtcctcaccacagcatgaagaggacccagcagaagggggagtcagagaggggagagggagtgaggcccacacatgcccaggcctcctgggctccacgcaacgctcacaagtaataaacacacattcatcacgttctagtacattccaacccccacctctttttttttttgaggcagagtctcgctctgtcacccaggctggagtgcagtagcgcgatctcagctcactgcagcctccacctcccgggttcacgcgattctcctgcctcagcctcccgagtagctggcactacaggcacgtgcaaccacacccagctaatttttgtatttttagtagagacgggttttaccatgctggccaggctggtctcgaattcctgacctcatctgatccgcccaccttggcctccaaagtgctgggattgcaagcgagcaccaccgcgcccggctgtgttgctgttgcttgtgacgaagtcctgtcttgtgtctcatccctcacgatacatgactgggcgagtgtttggggctgccatcacaaatcaccacaaatttcaggctgaaaacaacaccaatctagcacggggaagctctcagctgttgggaatggatcctgcagggctaaatttaaggtgtggacaggccgggtgcagtggttcacacctgtaagtactttgagagggtgaggtaggtagatggcttgcgtccaggagtttgaggtcagcctgagcaacatggcaagacctcgtctctacaaaaaaatttaaaaattagctgggtgtagtggcgcatgcctgtaatcccagaactgaggtgggaggactgtttgagcccgggagttcgaggctgcagtgagcctcgaaccccagcctgggcaacagagtaagaccctgtctcaaaaaataaaaaataaggtgtgagcagagctggatccttctggaggccccagggcttagggttagggtaccccccaacagtcaacagaacggcccccaccagagaatgatctggacccaaatgttcacagggcctgggggtcggggggaagagatgctgcattgtttggaaaaaaagcaagttagaggccgggcgtggtggctcacgcctgtaatcccggcactttgggaggccgaggcgggtggatcacctgaggtcgggaattcgagatcagcctggccaacatggtgaaaccccatctctactaaaaatacaaaaattagccagacatggtggcgggcgcctgtaatcccagctactcgggaggctgaggcaggagaatcgcttgaacccgggggacaaaggttgcagtgagccgagatcacaccattgcactccagcctgggcgacagagcgagattctgcttcaaaacaaaacaaaacaggcctggcgcggtggcccacgcctgtaatcccagcactttgagaggctgaggcgggcggatcacgaggtcaggagttcaagaccagcctgaccaacatgatgaaaccctgtctctactaaaaatacaaaaattagccaggcgtgatggtgcatgcctgaaattccggctacttgggaggctgaggcaggagaatcgcttgaacctgggaggcagaggttgcagtgagccaaggtcgggcctctgtactccagcctgggtgagagagcaagactctgtctcaaaaacacaacacaacacaacacggtgcccactgtgaacgcagtgacgacagagtctgcaccataagaaggtccagggtcaatggtttgtcacaagggagcccctggtgaggaccggctgggggacactgctcagggcagcctgggcacaggtggcaggaggacttgagtcccacccacgctgcagtgaccagaaaggcctgaacttccccagcccatcctggggcccttagccaccatcgtcacttcctgccaccagggttaacacccaactaggaacttgaacttttcatctgcctgggacaaaaaccctgtctccactttacagatgagaaaaccagggcccagaaaaccaggcctctaacccctggctctgtggacatcggggttggatcgttctctggggtggggccgtcaggggcactgcaaggtgctgagcggcatccctggccgccgcccctccctgccaggagctcccccaagttatgacaaccacagatgtgcccagacatcacccagtgtccctttgggttaagattagatcgccctgggtgagatcgtggctcagatgattatgactgattctacagcagtgtctcacgccacagagctagtgggtggatcggctggggctcgaaccctggactctgtgggtggatcggccgggtctcgaaccctggactctgtgggtgaagccaccgctctttctgccccacaactccctaaattcagcaactctcagggatgcaggcagccgtctgatcacaagcctagtgacacacgcttcccgggccagcgctgctccaccacggggcccctccactgcctagcagagccacgtggatgctccaagtccagggactgctgacccatcttggttttgctcggcggggcacaaccccagggtcaccacacaggtccccccgcttgcttctcttccatttttagagacaggttctcgctctgctgctcaggctagagtgcagtggcaggatcatggctcacacttcagcctcgacctcctagctcaagggatcctcctgcctcagcctcctgagtagctgggaccacgggcactcactgccataattttttataattttttcaccaccagttaattttttgttgttgttgttgtattttttgtagagacgggagctcactatgttgcctaggctggtcttgaactcctggactcaagcgatccatccgccttagcctctcaaggggctgagatcactggcgtgagccactgtgcctggccacccctgcctgcttcccaaggaaggagcaatcccgcagcccagcctcagaccctccctgggaagcccctgattcaaagaggccacctctgtgcttatggtatcccccggggccggggagcccgggacgcatccacgctgtggctgagcaggtgggagctgttgggggggacctgaggcccttcgccagtgacagctcagcaccccagagccctgcacctgccccagtgatgagctctgcaagccacacctgccctcaggccacaccacctgcagcacaagatcaataaatcccctcaggagaagggaaaatgccggccacctccaggccatggtccgcctggcactgagcgagatgctcctccacgctgggaatcaatcacctcagtccccacatgcctgtctagatggggcgagtgcaggccccactttaccaaagaggaaaccgtgcaggcgagcagatccccatccacccagccaggcccactcacctccctcctccccgtttccgcttcacatctgggccgactcacagccaactttccaactccaacagaaatcacagcacagagcaaaacccaacctgccacagcctggtgctgccgtttgttgatttcagggcctcccatgccaatttgggggcttagcttccaaccgtgccacctggttgggcaggcggggccttccagcagtggtattgcagccctgggctgactgcagccatgggaggagaccccctacctgggctgagcctcagggagaaagcggctgttcccacaggcccccgcttgtctttttaaaactttttgtagagatagggtctcactacattgcccaggctggtcttgaactcctggtctcaagtgatcctcctacgtcagcttcccaaagtgctgggattacaggcgtgagccaccgtgcctggctgaggcttatctttgtctatatccttttaagcttgtctaccagactcacaccaagacagttccagaaaacaagacagggcagcccgaggagcttgtaaacttcctcttggcatgtctgtctcctttcagaaggtgaggggtgccaggcgaggtggctcatgcctgtaatccctgcactttgggaggccgaggtgggtggatcacttgaggtcaggagttcgagaccagcctggccaacatggtgaaaccctatctccactaaaaatacaaaaaactagccgggtgtggtggcatgtgcctataatcccagctactcaggaggctgaggcaggagaatcgcttgaacccagggaggcggaggctacagtgagctgagatcacgccactgcactccagccctggtgacagagtgagactccgtcacaaaaagaaaaaggtgcaggattttcagtggaagttaacatcttctgaagaaccttgtggactggcagagttcccgtcacagcagacggttttttttttcctttttattttttttgagacaggatcttactctgtcgcccaggctggagtgcagtggcatgatcttggctcactgcaaactctgcctcccaggttcaagcaattctcctgtctcagcctcctgagtagctgggactacaggcgcccgccaccacacccagctaatttttgtacttttagtagagatggcgtttcaccatgctggccaggctggtctcaaactctttacctcgtgatctgcccgctttgccctcccaaagtgctgggattacaggcgtgagccaccgtgcccggcctagttttttttttatttagagacaggggtttcaccatgttgcctaggctgctctccaattcctggcctcacgcaatcctcccacctcagcctcccaaagtgctgggattacagacgtgagccaccatgtccggcccgagcaaagcgttttctatcaggaacaaacacaggctccttggcggaggggtgattggccacagaaaggggtcttttccaaagaaaggccggggtggcctcgggaccctgactcccgccctcgttgtcccctgaggccgggggcaggttaccgtgtctggggctccctccgctctgctcttctcggattcctccaggaacagtggagaagacaaggcaggaatcagctctcagaattccacaccaaggccttctgggctcccccggtcttcccacggacgagacacaagtgacccttggaaacttctagagaaatgaaaggtgaaatgacaaattcccctgctgcaacactttttttttttttttttttgaacaacacagtttctctaagcaaccaactggtatgacccctcccccaccgaggtgtagcagctcacggaccacagtcacccacttccttccggaggtttccacatcctgccactgcctcggggaccgctgccccagagcacgggaggcgcctgagagacaagccctgagtggagaagtcagttccatatgttctaggtcagtgcacaacactggctcccggcctggcagcccagccctcatacttggctggaagatgctcccagcccagaatctgtcctgctaaaaaaggcgctgggcgcggtggctcacgcctgtaatcccagcactctgggaggccgaggtgggcggatcacaagatcaggagatcaagaccatcctggctaactcggtgaaactcgtctctactaaaaatacaaaaaaatagccgggcgtagtggtgggcacctgtagtcccagctacttgggaggctgaggcaggagaatggcctgaacccgggaggcagagcttgcagtgagcggagattgtgccactgcactccagcctgggcgacagagcaagactctgtctcaaaaaaaaaaaaaaaaaaaaaaaggcagcatcccggagccaccttccaaaatctgagtatttatttatttttactttcatttatttatttttttgagacggagttttgctcttgttgcccaggctggagtgcagtggtacgatctcagctcactacaacctctgtctcccaggttcaagcgattctcctgcctcagcctcccaagtaacagggactacaggtgcccgctacaacgcccgactaattttgtatttttagtagaggtggggtttcgccatgttggccaggctggtctcgaactcctgacctcaagtgatctgcccacctcggcctcccaaagtgctgggattacaggcgtgaaccataacgcccagcctctgagtgtttatttttacttttttatttttatttttttgaggtgaagtgttgctctgtcacccaggctggagtgcagtggcgtgatctcggctcactgcaacctctgcctcctgggttcaagcgattctcctggtcagcctcctgtatagctgggattacagacacacgccaccatgcctgcctaatttttgtatttttaggagaaactgttccaccatgttggccaggctggtctcaaactcctgacctcaggtgatctgcccacctcggcctcccaaagtgctgggattacaggcgtgagccagcatgcctggcctgagggtttacttttaaacgttacaactgctcctggtgctggtaggccaccctcactcctgctggaggatggctgcgtcttccctgatcacccaggcgtgcatcctgtcactgttttgtgcttttgtctggtttacatttttgttttttttagagacagggtcttgctctgttgcccaggctggagtgcagtagtgcaatcacagctcactgcagccttgacctcccgggctcaagtgatcctcccacctcagcctcttgagtagctgggactacaggcacacaacaccacacctgtataatttttgtatttttgtagagatggggtcttgctatgttgtccaggctggtcttgagcttctggagtcaagcgatcttcccacctcagccacccaaagtgcagggattacaggtgtgagccactgtgcctactgcatctctgacttctctcgtgggaaagcagacaggcaggaagcaaggcctgcccaggcccctctgggccaggtgctatcgagggcttagcatactgtcctaattctcctgatagtcttttcttctgtttttagattgacatatgactcacatcccacacgttttaaccttttcagttacagttcaggagtacagttacgtgactcctggcacgtttggcgttgcgcaaacaccacctttatctaattccagaacactttcctcacccctaaaagaagccctggccagctgcagtggctcacgcctgtaatcctggcactttgggaggccaaggcaggaggactgcttgaggccaggagctcaagaccagcctgggcaacatagtgagacccatctctgtacgaaatagttaagaaattagccaggcatggtggatgtgcctgtatagtcccagccacttggaggctgaggtgggaggattgcttgagcccaggagatcaaggctgcagtgagctatgattgtgccactgcactgcagcctgggggacaaagtaagaccctgtctcaaaacaaagctaagatcgtgtcacctaggggacagttacagtgatgagacgtcacggacacctgtggtgcctgcttcagaggactcagcccaaagtttcaagagacaagagaccaagtgtcagaaagaggaagccacagggaggaacgccccaagctaccatcccaacccagggccacactcctttcacggaactttttcctaacccagggccgcaggatctgggcttgactgggcaccaccgacttggcaccgccttcttggcctcctggatggcttcagtctgaacgcgggggcaggagccatgctctgagcccgcccagtgggagccaggggcccaccccagtctcgcctcctcgtggccactgtgaagagctctcagccacactcagctgcagtgggggtctcacctggggggcgattctgcaccccggggactcatactgggtgatgtctgggggcatttgtggttgtcataactggaggatgctcctggcacagagtgggtggtggccagggatgctgcccagtgccctgcagtgcccaggataccccaccccagagactaatcagccttgaatgtccacagtgccgagggggacaaagcttgtcctgcgagtggcaaggccggggatctaactgttcttgtttgctttattttattttttgagacaaagtcttgctctgtcatccaggctggagtgcagtggcacaatcacagcccactccagcctcaacctccggggctcaagcaatcctcccacctcagcctcctgcgtagctgggactcctggcgtgcgtccagataatttttctattttttttcttttttgagatggggtcccgctgtgttgcccaggttggagtgcagtggtgcgatcttggctcactgcaacctccgcctcacgggttcaaggattcttctgcctcagcctcctgagtagctgggactacaggtgcgcaccaccacacccagctaattttttttgtatttttagtagagacagggtttcaccatattggccaggctggtctccaactcctgacctcatgatccgcccgcctcgacctcccaaagtgctgggattacaggcatgagccaccacacccggcaatttttgtattttttgtagagacgggggtcttgctatgttgtccaggctggtcttaaactcctgacctcgagcagtcctcccaccttggcctcccaaagtgctgggattatagacatgagccacggagcctggctctgtctccctctttaatgagtaatttttacaaattgccaacctcaccactagttagtacacagtgactgtagttgtcagaggctcaaacgtgtatctggccatccgtgtttctcctgctttctggggagcacttccctacgcactcataaactaaccctacaggggttcatgccgcagccctgtgaggctggcagggcaggctgaaagcgaatgctctcattcctgctaagtgatggtggacctttgctgtcattagtaaacaggcctggcatttgctggggccctggaggacctgctctcgtgaaactcatcatttcctggctggcgggaggggctcacccgtgctgcacgtccagaagctgaggccagttgcctcgcctgagggtgggaggtaaaaggtacaagtctgggcttgaactcagatccttcaattctgaatctgctgcgtctgccactagggcagcgtttccactctctgcactgtggacatcggcgtgggtcactctctggggaggggccatcctgggcactgcagggtgctgagcagcgtccctggcctccacccactccatgccaggagcacccccagtcatgagaaaaacacaaatgtcccagacttggcccagtgtcccctgggggcagaattaccctcaattgacacctcttgggttaggggattccacggacccccaagagactccgtggcccatgatcctctgctctgctgaggtcccaggaggctacacacattgaaatccacagagggggagaggaagagaatcccaggagctgaggtcccctggtttacaccgtctgccatattgggagtttattctggtgtctggtgtgagcagggagcagacttgatttttttttcccaaataactaatgcagtcccccacttggcattcagggctggatccttctctgggtgagtttgtcctgggcactgcaggtgctgagcaatgtccctggcctccacccactccatgccaggggcagcccctcctctagttgtgacaaacacaaatgcaccccccgcactgccccgtatttccaagtcccctgggggcaaaactgccctggggcaagacctcagctagattggcagcttcccctctgatctaatctaccagggactccactgaggggattctgggggccccgatacccgatccatcttagcccagccaagtccgcatccccagagctccgcagctgccaggcgcttctgaaaccagcatctgcagcccggcagagctggcatggtgactcaggctgccttggttctccagggcacgtagggtgcgactccccacccaggtgtcccagctcagcccatccctttgtccccggtgggaattgtctgtgcttggagtggctcacacccccgaccacttcctttttcttctcatttgcctcgtggcccagaggatgttggcgggctgagtcagggatagaccaccctgccccctgcccccacaggcctgaacacggtgaagattctgcccctcaacaccggacgatgtctggggacatctgtggttgtcaggttttgggggaactcctggcatggagtgggtggaggccaggaacgctactcagcaccctgcagtgcccaggacactccaccccagagaatgactcaatacccagggggagaccctggccccagccccacacaggaagtaacaacttcctccttccctgtgggacttatggtcaatgaaatacgacattaaacatagcaatgatacaaatacgttatttttttttttaagacggagtctcgctctgttgcccaggctggagtgcagtggcgcgatctcgtctcactgcaacctccgcctactgggttcacgccattctcctgcctcagcctcccgagtagctgggattacagctgcctgcaaccgtgctcagctaatttttgaatttttagtagagacggggtttcaccgtgttagtcaggatggtctcgatctcctgacctcgtgatccgcccaccttggcctcccaaagtgttgggattacaggcgtgagccaccgcgcccggccaaaatacgtgcattattttaacacacttttaaaactaataagctgaatataaagctctgcattaaagccagaagacctaagagaaaacccacaacctgtggggaagaaaagggagggaaacctccgtgaaactgacccctgcagtaagtaaccctacaaccaagattccagtgccggctgctggccagatcaggggaacacgcgcttcctgcagagtcattcccaagcccatctggctggaaagaaaagccttaaacttgagccaaaacctctcaacccagaggagacttctcatccttgtgtaacccaggacggcccggccacacagttttaagaagaatgagacacaggctctgacacggaaggacacccaatatccgataagtgcaaaaaataagttgcaaaacagtatggatacccagacctttttttcttttttggagaccgagtcttgctctgtcacccaggctggagtgcagtggcgcaatctcggctcactgcaagctctgcctcccgggctcaagcaattctcctgcctcagcctcccaagtagctgggattacaggcgcccgccactacgcccagctaatttttgtatttttggtagagacggggttccaccatgttggccaggctggtctcaaactcctgacctcaagtgatccacccacctcggcctcccaaagtgctgggattacaggcgtgagctactgcgcccaggctctaagaccttttttgttaaagaaggaataaaagccggggtgcggtggctcatgcctgtaatcccagcactttgggaggccaaggcaggtggatcacaaggtcaggagtttgagactggcctggccgagatggtgaaaccctgtctctactaaaaatacaaaaattagccaggcgtggtggcgggcgcctgtaatcccagctattcaggaggctgagacaggagaatcgcttgaacctgggaggcggaggttgcagtgagccgagattgtgccactgcactccagcctgggcgacgagcaaaactctgtctgtaacagaaaaaaaaaagagaaagaaagaataataaattgctacaaccatgaaaaaaaataaggaactattgtgtctggaaggaaagtttttttttttttttttttttagctgcctgtttgtttgagatgaggtttcgctctatcccccaggctggagtgcagtggtgcaatcacggctcactgcagcctcaacctcctgggctcaaatgaccctcccacctcagcctctcaagtagctgggaccacaggtgcacgccaccacgcccagctaacttttgtatttttggtagagatggggtcttactatgttgcccaggctggtctcaaactcctgggttcaagctatccttctgccttggcctcccagagtgctgggatcacaggcatgagccatagcgcccgaccctctgtgaatctttgtggtaaactgacatacttttcccagtctgggtatataaggaaaaaaacagtcattttgatatactcaaaaggaaaagggggtgaggcgcggtggcttacgcctgtaatcccagcactttgggaggctgaggcaggcagactgcctgagctgggcaacatggtgaaatccagtctctactaaaacaccaaaaaattagccgggcgtggtggcgcatgcctgtaatcccagctactcaggaggctgaggcacgagaatctcttgagctcaggaggcggaggctgcagtgggccctggttgcgccactgcactccagcctgggcaagagaaactccatctcaaaaaaaaaaaaaaaaaaaaaaaggaaaagggaagaggccaggcatggtccccagaaggtattgtgtcaaagtctgaaagaaaacccaagttcagctttcttttgtgtgcagccaggcacacgctggaccacagccacccactgtgtgttccagagacttctctgggactccgaaaggcagaagtgaaggcctcctcccagaatcccgtttctgaagtcggatttaccttttcggcttaagccatttgaccttctaaatgccaggaaaacaggaacagagctcatcggctggggaaggtctaaaactccccaccttaaaaccccaagctcagtcagctgtgtggggaatttttctgaaacctccaccatcaggtccctaaggtgggaggatacctccttggaagggaatttttttttttttcgagacgttgtcttactctgttgcccaggctggagtgcagtggcgtgatcttggctcactgcaagctccgcctcccgggttcaagtgattctcctgcctcagcctcctgagtagctgggactacaggcacgcgccagcatgcccgggtaaattttgtattcctcagccgatgagctctgttcctgtcttcctggcatttagaaggtcaaatggcttaagctgaaaaggcaaatccgacttcagaaacgggattctgggaggaggccttcacttctgcctttcggaatcccagagaagtctctggaacacacagtgggtggctgtggtccagcgtgtgcctggctgtgtatttagtagagatggggttttgccatgttggccaggctggtcttgaatgcctgacctcaggtgatctgctctcctcggcctcccaaagtgctgggattacaggtatgagccacccgcacctggccagcacatcccaattcggaccagccacattgcaaggcctccacagccacaggtagtaagctcagctccagagttaaaagagaaaaatcaacctgtggaaagagagggagctgggaagggtgcagtggaacgggtgttgcttgaggtgggtgcctgtgtcgtccctggggaaagggaaacacatccagggggtccggaggacagggacgtgacatgctgggatttcactttcttagttctcactctgtaatcggtagatctcagtgagttctaataaacaggtccctgacaactgcggttaagaacccggcttctggaagttctcagggctgcaactctgcaactctgacagcccggggggctcatccagccctccttccttccctatgtaagttctttttttttttttttttttttttgagacagagtctcactctgtcgcccaggctggagtgcagtggtgcgatctcggctcactgcaggcttcgcctccagggttcatgccattctcttgcctcagcctcccgagtagctgggactacgggcacccgccgccacgcccggctaatttttttgtctttttagtagagacggggtttcactgtgttagccagtatggtctcgatctcctgacctcgtgatccacccgcctcagcctcccaaagtgttgggatcacaggcacgaacgactgcgccgggccaccctcttgcacttctgaaacaaccagcaaaccaaccaaccgaacaaataaacatccagcttcccctacatgaaagcaagaccaggcctggaaaggaagtgaatccaggagaacagaaacggaaggtgggttttgtctcacgggtcaaaacctagatcatcccacacacgcagggaaatgaatgactagttcctcaaggcatcactgtgggctctgacggctccagccttcagcagctcctcagctctgcgtcccagcgcctcttccgtaaaagggaagcccctgtgactgcgtgatgcacaagaaggaaggcggtcttgggaccacggcctagagggcggccagggcactccccgctgcctatgcaggaggcaactcccaaagcagaaagcacagatgggatgtgaaacacgcaaaacacaatgtcaacatttatccaaccatctgctttgaatacgggcagtttattgcatgtcaattaaacccgtataaactgttaaggagaaaacgaagaaaaaagcaagtgcgaaaaaagcagtgtgggccgggcgcggtggctcacgcctgtaatcccagcactttgggaggccgaggcgggcggatcacctgaggtcaggagctcaagaccagcctggccaacatggcgaaactccgtctctactaaaagtacaaaaattaactgggtgtggtggttggcgcctgtaatcccagctactcaggaggctgaggcaggaggatcacttgcacccgggaggcagagtttgcagtgagcagagatcgcgccactgctctccagcctgggcgtgagtgagactccaaactccgtctcaaaaacaaacaaacaaacaaacaaacaaacaaaaaaacagtgtgtacaaagactggaaatcttacccccaggatgagctgcggcttggagcactgattttctgctctgtgactgcattttccaatttcccctcccctctcagtgactcctaataaaatgcaccctcgcttacactttctagcccctcttcgctgcagggaggaggggcagcttgtccctggcgggcgcctccttccggggtgggggggccctgccagcgactttggggaccccgagcaagaagggcctattcgaaagggcccgaccgccgcgttggcttggggatcctgaagccctgcagaattttaatccacaccgggaggtgcggggtcctgcgggagggcagcgggcagggccaggagttcacccccgcagctcgaccccgcaccctgtatccccctccggggtaatcggtctccccgccgcccgcgttcgcccctcctgggggatcggcctcctcgccgcctaagttcacccctcctgaaggatccggcttccctgccgcctgagttcgcccttccttttttcttttttcttttgttcttttttttttttcccccgctctggttgcccaggctggagtgcagtgatgtgatctcggctcactgcaacctctgcctcctgggttcaagtgattctcctgcctcagcctcctcagcagctgggattacaggtgcgcgccacctcgtccggctaattttgtatttttggtacagacggggtttcaccatgttggccagactggtctcgaactcccgacctcaggtgatccacccgcgtcggcctcccaaagtgctgggattacaggcgtgagccaccgcgcccggcctcgcccttcctgaaggctcggcctccccgtagcctaagttcgcccgtctgagggatccagcttccccgccgccagggttcgcccttcctgagaactcggtctcctcgccgcctaagttcacccctcccgggcacccacctggccgcctctgccgcccgccttcgcccctcccggacacccacctgatcgcctctgccgcccgccttcgcccctcccggtacccaactggccgcctcggccgcctcagccgccgcaccgcctcgcagccgccgcggagggacacggccgcgggaacgccccacacgcatgcccgaccgcacccgcggaccggacctactttccttaaagggcccggggctccgcgcagaagcggcgtgcaggggtctcccagactcggtcccgcgggctttaaggggcccgggcggcgaaggcgcacggagccaagttccgggcagcagccctgggatgccctgagccgggccgggcggaggtctccgttgcctagcaaccggggccgcggcctgtgggcggagcctgcaccgtggctgcgacacggggcggggcctcagcgggagccggccgaggagcgggcaccggccattggcacaggcacgggccattggcgcatgcgtagggcgcggccttggggcggggcccacccagtggcggagtcttctgaggggcgggtcgtgggcggggcctggaggcggagccggcgccgtcagtagtcggctgaggacggaggcggggctgggcctgggatggggcggggcctgcgctggtggggcgggcgggggaggagacacggccaagcgcccgagtgggggccgttggttggtgcgcggctgaagggtgtggcgcgagcagcgtcgttggttggccggcggcgggccgggacgggcatggccctgctgctgtgcctggtgtgcctgacggcggcgctggcccacggctgtctgcactgccacagcaacttctccaagaagttctccttctaccgccaccatgtgaacttcaagtcctggtgggtgggcgacatccccgtgtcaggggcgctgctcaccgactggagcgacgacacgatgaaggagctgcacctggccatccccgccaagatcagtgagtgccggagcccagcccagtcccgactaccccgccagcgagaccccggggcaggccggtcacctggcttctcctcctgcccgcagcccgggagaagctggaccaagtggcgacagcagtgtaccagatgatggatcagctgtaccaggggaagatgtacttccccggtaaggggcgcgaaaccgaggcggggcccccccaccccgggacaccccgcccaccgcctgagcctgaccttctcctgcctcgacgactcagggtatttccccaacgagctgcgaaacatcttccgggagcaggtgcacctcatccagaacgccatcatcgaaagtgagcaaataaggcttcagaggagggaggtgttgcccagagcctcggagacccacggggcttggctgaggctggagtgatgtgaacagggcacctggcaccaggcagctggggaggagggcagctctccagggagggacccagcctagcacctgaaggatcaatgccatcaccccgcggggacctcccctaagtagcccccagaggcgctgggagtgttgccaccgccctcccctgaagtttgctccatctcacgctgggggtcaacctggggaccccttccctccgggccatggacacacatacatgaaaaccaggtgagcctgggccccagtgccgagggacaggccctgaggctttggagggttgggaggaggcaggactggggacaaggctgggcctggtaagatggcgctgtcctgccctcccacaggccgcatcgactgtcagcaccgctgtggtaagcaaggctccgtccaggctgaggggcgtgccggtggcagctcggggccctggaggctgaggggagccctggcggctcttgtacgtgtttcaggcatcttccagtacgagaccatctcctgcaacaactgcacagactcgcacgtcgcctgctttggctataactgcgagtagggctcaggcatcacacccacccgtgccagggccctactgtccctggggtcccaggctctccttggagggggctccccgccttccacctggctgtcatcgggtagggcggggccgtgggttcaggggcgcaccacttccaagcctgtgtcccacaggtcctcggcgcagtggaagtcagctgtccagggcctcctgaactacatgtgagtggggtctttgggtggcagcaagctcacctgggcctgggagggaacactggccacggccactcggcctcctgagtccaaacccactgtctttgtagaaataactggcacaagtaagtcccctcctcaaaccaacacaggcagtgtgtgtatgtgagcacctcgtgggtgagtatgtgtggggcacaggctggctccctcagctcccacgtcctagaggggctcccgaggaggtggaacctcaacccagctctgcgcaggaggcggctgcagtccttttctccctcaaaggtctccgaccctcagctggaggcgggcatctttcctaaagggtccccatagggtctggttccaccccatcccaggtctgtggtcagagcctgggagggttccctacgatggttaggggtgccccatggaggggctgactgccccacattgcctttcagacaggacacgagcatgaggtaaggccgccctgacctggacttcagggggagggggtaaagggagagaggaggggggctagggggtcctctagatcagtgggggcactgcaggtggggctctccctatacctgggacacctgctggatgtcacctctgcaaccacacccatgtggtggtttcatgaacagaccacgctcctctgccttctcctggcctgggacacacagagccaccccggccttgtgagtgacccagagaagggaggcctcgggagaaggggtgctcgtaagccaacaccagcgtgccgcggcctgcacaccctgctgacatcccaggcacgagggtgtcgtggatgtggccacacataggaccacacgtcccagctgggaggagaggcctggggcccccagggagggaggcagggggtgggggacatggagagctgaggcagcctcgtctccccgcagcctggtatcgccagccttaaggtgtctggagcccccacacttggccaacctgaccttggaagatgctgctgagtgtctcaagcagcactgacagcagctgggcctgccccagggcaacgtgggggcggagactcagctggacagcccctgcctgtcactctggagctgggctgctgctgcctcaggaccccctctccgaccccggacagagctgagctggccagggccaggagggcgggagggagggaatgggggtgggctgtgcgcagcatcagcgcctgggcaggtccgcagagctgcgggatgtgattaaagtccctgatgtttctctttgcagaagagttcttgttggggcagggggaagcctctaggggctggaggtgggcttctggggaggcctaaaggtcccagacagagcagggcaggtcctggccttgggtccacagccatgagggaccgacttggagccacactcacagggcctcagggagtgtccccggactcctaggtgtggggccgtggcccacctgagcacacatgggtaggctcacacaagcccacagagcacctgggttcttccacccaaagcgaggccacagtgtggttgagaccagggccagcactagtgcgtttaggtgttgcagtcacttacgtcagacccgagccaaggaacgcaggaactatgggctgtctcatctgtggcagtgacaggcgtggcatcatggccagagtcggggccacgacggcctgactctggctgatggggcctgacacacaggagggagggagtcgtgttccatctgtgcaggggcgcagctccaagtcccattctcactcgggcgacctcagcccggcagtctccttgcttcctcgagcgtccctttgctccggcattggggcggctgcaggacaccagcaagaacatcctcgagcacactgttgctgccaccatgggtcccacacactgtcttgtggccgcctcaggctcccgtcacgggaggggtgcacgggcacatttgctgaggtcaggaacggcgtgtgggaaggtcaccgagtgcctcccaggctccctgggacatgggagccacacgcatgttgggggagaatgtggtagtggccactggggacagtgtcaggagtgatggcgctgggtcctggctgtgaaggatgctgctttcgaggccggcaagcgtgtttaggtaacggcaaagaggctcgcggcaggtgctttcaaggcatggttttctagaaaggatgctggtgtgggccggggctggggtcccgtctgtgctgctctgagccccctgacatccaacgcccgccaccacggccgcgtcttgggttagagtggacaggggcttcccttcactgacccagcgtcaccttgctcgaggctcccgtcttcaaggtgtaaggctggtgtaaaggaggcaaattcacccaggggtggggtggctgctcttccgcggttctcaattctggatctgcccctgccccgggggctcctggggaaggggagggaaagcaggcacctgctcccctgcacggccttgggtggagatgctggggaccgaggccaccacggggtgggggactccctggcctgtgactgcccgagccccaggcctggatggtgctggggaccgaggccccctcccaagggcccgtgagctgaggtgcagaggctccagtcctgcagcgctgcatgacccaggccaggcagaagacccatgtggaaatgcctgttttacaactttattggatcatcttgacacaaaatcatgacagcagcgtgatatgtctctctctttatacgggaatgtcgatagcaaataaattcttatgtaacacatcatacaatttcaaatcctggaatcactgcatgggattctgtaatggattacatgctaaagtgacagttttcatcaaaaggagaagataaaatgtcattatctctgaagaagggtcagtcctgtgcccacgctggccgtggggagtgagcggagtctccttgccctgcctggtgggggctctgcctgtgaggtggctctcacaggtcctgcccaagggcactgggcacactccttcaacacagaacagcccaggtccgctgcttccaggccctgcctgggccttcctaagggtgctgggaaggatgtggggaaaccttggtgcgcatagtggcaagcaggggatgcggaccaccccaaacccaagccgagatgcacttctgctgaccaggaagacgggtggcagagaggcctcaacccaccccgtccacggttctgactgcaacctctctttggcgtccctggccccgccctgcccacagcctggctggcgcgtggcctgggatcccaagacccagtcaccagcccacgagcacactgacaatggacaacgcctggcaagaccgctttcccactgtgggttctgggagagaaaaccttggcgacagcggcccttccttcccctcccccggacgcaaccgtcaggacctttgggtcaaaagcaggcgaccccagaggaggccacgtcagccccgccctgtccaccaagtgcccctcacgtggtgcccatcaggccctggcccaggacaggagcccctgaagccacattcaaggactcggcccccagcgcggggcagggcacagacccaggtgggggagtcccttgctggtttgggggcgagaaggggacttcttgccaaagagaatgggaagagtcacagtaaaaaaggatggtcagataattcaacgcaacaaatgacctcggatgtctacacggcggacaacatagagttaaattaacactcaggcttgggtacagtacacacgactgaggagaggcgagacacgtcagggctgcggtccctgggtacgtgctccgcggggtggtgcggggctcgcaggcagctctcaacacttggccagcgtcgccttcatctcttctaacaagttgctcagtagcgtggagtcactgcacttcccgtcgactgagacagagttctcaccctgtgtaaggaaaaaagatggatattttaaaagtgtgtgcaggggctaggcacggtggctcaagtctgtgatcccagcattttgggaggccaaggtgggtggatcacctgaggtcaggagttcaaaaccagcctggtcaacacggtgaaaccctgtctctactaaaaatacaaaaaatggccgggtgcggtggctcacgcctgtaatcccagcactttaggaggctgaggcaggcagatcaccaggtcaggatattgagaccatcctggctaacagggtgaaaccccgtctctactaaaaatataaaaaattagccaggcagggtggcgggtgcctgtagtcccagctacatgggaggctgaggcaggagaatggcgtgaacccgggaggtggaccttgcagtgagccgagatcgcgccactgcactccagcctgggcgacacagcgagactgtctcaaaaaataaataaataaataaataaataaataaataaataaataaataaataaaataaaaataaaaaatgtgccgggcatcgtggcaggacacctgtaatcccagctacttgggaggctgaagcaggagactctcttgaacccagggggtggaggttgcatgtgagttgagatcattccaccacactccagcctgggcaacaagagcaaaactccatctcaaaaataaataaataaaagtacatgcaggccaggccggatggctcatgcctgtggtcccagctatgcgggaggctgaggcgggagggtcgcttgagcccaggagggtgaagttgcagtgagccgtgtttgcaccactgcacaccagcctgggcgataagagtgagttcctacctcaaaaaaattaaaaaacaaacaaaaaaacactatgtgcaaatattgcctcgcagctgtatgtgttgtccttttaattttgcgaatttgctaattattaaaaaaaaaaatgggaagggctcgggtgagggagcggcccaaggcacctgggtctcccgtgggaggggctccagcctacatagaagtgggagccggcacctgagggccctgaggcagccagaggcagccggggatgaagaccagaatccgaagagctcctgagctagcagacagttgagcactgtctgtccttccgccctcctgccactgggcccctgaagtgactgtggaagaagccagtggagtggggtaaccagagcccccagagagggaggtacgcggggaaagccaccccgtgaagctgctcacgatctgctaggctcactccatgctgcggatcccgttccaaagagcaaccgaaggcactgagtccagaggccgctgccgggtcccaaggccagggacaagaggcagcactgacaggagaggctgggcaggtggtggtgtgcttggggccacagtccccagaaggcaggggggacttgcagctgggacctgaccacccacgtcctccacaggatggaacaaggcccagaggctcacagcactccacggaaaacgaccaggagaatccactcatacagagaggccctcggcagaccccagtgccaagaccccagtgccaaggcaccaacaccaagacaccagtgctaaggcactaatggcaaggccgtcggtagaccccaatgccaagatcacatcacccagatgccaacaccaaggcaccaatgccaaggccatcagcagaccaaacaccaagacactaacacccagaccctaatgctgaagcaccaatgccaagaccccacgctcaagaccccaacaccaaggccgtgagcagacaccaacaccaagacaccaacacccagaccccaacgccgaggcaccaactccaagacgccaacactcagaccccaacgccaagacaccaacactcagactccaacaccgagacaccaacgctgagaccgcaacaccgagacaccaacactgagactccaacaccgagatgccgaaacccagaccccaacaccgaggcaccaactccaagacgccaacacccagaccccaacgccaagacaccaacacgcagaccccaacacccagaccccaatgccgagaccgcaacactgagacgccaacacccagaccccaacgccaaggcaccaactccaagacgccaacacccagaccccaatgccgaggcaccaactccaagatgccaacacccagaccccaacgccaagacaccaatgcccagaccccaacaccaagacaccaatgcccagaccccaatgccaagacaccaacacccagaccccaacgccaagacaccaatgccaaggccattggcagaaaccaacacgaagaccccaacgtgcagaccccaacaccaaggccatcagcgtaccaaggtggacggacactaggactctctgacacaagtttttttttttttttttttttttggagtctcactctgttgcccaggctagagtacagtggcacaatcagggctcaccgtagccttaaactcctgggctcaagagatcctcccaccccagcctcccaagtagcagggactacaggctcactgtactaatttcttagtactggctaatttttttaattttttgtagacctggggtcttgccatgttcccaggctgatcttgacctccagggctcaagcgatcctcctgcctcagcctcccaagtagctgggaccacagtcacacaccaccatgcccagctggcctaagctttaaagtagctgttaggaaaatgctccaacagatcaccagggcatcagcaaagacatggaagatacaagaagggcccagtgggaatttcagacctgaaaaataagaccctccctgtgtgggctcaatggcagaacagctaggacgaggcagactggtgagcttggcaagagagcaacagccatgaacccatctgaatacggcctctggggcgtgaggggcagcagcccaggctggggaggtgttgggagcaggccccccaaaatctggccataaactgaccccaaaactggccataaacaaaatctctgcagcactgtgacatgttcataatggccctaacgcccacgctggaaggttgtgggttgatgggaatgagggcaaggaacacctggctggcccagggtggaaaaccacttaaaggcattcttaagccacaaacaatagcatgagcgagctgtgtcttcagggcgtgttcctgctgcagttaactagcccaacctattcctttaattcggcccatccattcgtttcccgtaggggatacttttagttaatttaatatctatagaaacaatgctaatgactggcttgctgttaataaatgtgggtaaatctctgttcggggctctcagctctgaagactgtgagatccctgatttcccacttcacacctctgtatttctgtgtgagtgtctttaattcctctagcgccactgggttagggtctccctgaccaagctggtctcggcagggaggaagtgtgcagcacccaaaaagcagcaacagatcagctccagccgcctcaggcccagcagaatggctgccgtcagccgggcgcgggggctcgtgcttctaataccagcactttgggagtctgaggcaggcggatcaggagtttgagactagcctgaccaacatggtgaaaccctggaaaccccgtctctactaaagagacaaaaagattatccaggcgtggtcgtgggcacctgtaatcccaactactcaggaggctgaggcaggagaatcgcttgaacccgggaggagctgcagtgagctgagatcgcaccactgcactccagcctgggcgacagagcgagactccatctcaaaaaaaaagaatggctgctgtcagcacgatgacgacaggtgaagaaacagggcctcctgcacggcagcaggcgggaaacaaagtgcagcactggggaagacagtctggcagctcctcaaaacctcaaacgtggcattaccacaggacccagcaatcacactcccgggtgtatattcagaacaaatgggctcactcctgcaatcccagcactttgggaggccgaggcaggcagatcacccggggtcaggagttccacatcagtctggccaacctggcaaaaccccatctctactaaaaatacaaaaattagtggggcgaggtggcatgtgcctgtaatcccagctactcaggaggctgaggcagaagaactgcttgaacctgggaggcggaggttgtggtgagcccttggctccactgtactctagcctgggtaacagaacaagactctgtttccaaaacaaaaaaataaaaaaaaacaaaagtactgaaggcagggactccaacagttatttgtttaacaacaatgttgatagcagcacaattcacaacagccagaaggtgggagcagcgatggatgagtggacacacagcatggtccatctgtacaacaaaatatgattctgctgtgaaaaggaagggaatcctgacagaggctgcgatgtggatgcaccttaaggacatgaggtgtaataacagcagccagacacagaaggatacattccgtgtggttccactcctaggaggtccctagagccatcagattcacaaagacacaaagtagaatacatggtgccaggggctggggaggcaacggggagtgagtgtttcatgggaggcagtgaatcaggagaaaactgaacattaggaatgaaaagaacagcaatgacaggccggacgcagtggctcacacctgtaatcccagcactttgggaggccgaggcagacagatcatgaggtcagaagattgagaccatcctggctaacatggtgaaaccctgtctctactaaaaatacaaaaaattagccggatgtggtggcgggcgcttgtattcccagctactgcggaggctgaggcagaatggcatgagcccgggaggcggagcttgcagtgagccgagaccgcgccactgcagtccagcctgggcgacagagtgagactccatctcaaaaaaaaaaaaacaaagcaagggtatcaaaaccacaacagacctctaggaacggaatgctgagtagtgaacatgagccagaagaaggcagagaagcgaaagaaacacgtgcaaactggaaatcctcagtatgctcccagagggcactggaaccaaaccggacatcaagaaaaattggttgtttgaaaagtgcaataaaggccgggcgcggtggctcaagcctgtaatcctagcactttgggaggccgaggcgggcagatcatgaggtcaggagattgagaccatcctggctaacacggtgaaaccctgtctctactaaaaatacaaaaaattagccgggcgtggtggcaggtgcttgtagtcccagctacttgggaggctgaggcaggagaatggcgtgaaccagggaggcggagcttgcagtgagctgagactgcaccactgcactccagcctgggcgacagagcgagactccgtctcaaaaaaaaaaaaaaagaaaagtgcaataaaatggttctacccaggagaaccaggaaaaaagagacacaaaccgtgaccatcagaacggaaagtgacccggtatcatcacaaggagcagcgcgaatacggcacgcaccgccacgcgtcaactcagtgactgatgattccttgcgctaattctttgaaaagtacaaaactaccaaactcacccaacgtgaacggtaacttggggattcctacaactgttaaaacaaaaaactgaggatgtagctaaaagcctgcagaaaaggaactccccaggcccgatggttttctggtgaattctgtatacacatttctttctaaggaagaaatgccacttatcacacagtctgccccaaaacagagaggacacactctactgcacgtctgatgaagccactggatgacaaaaccaaagaagccaccagaaaagaaaactaaagacccaactcctcatatacagacacaaaagccctcaacaaaatattcacacactgcgtttggcagtcgacacactgcgaagacaaccaccctgcagtactcaggagagggaggcccggagcggagggagcgaggagtcattctagaagcgcagcagtgagaggtggagagtccgaccccagggccttggctgccttgtgcacaggggtggggtggtgggcaggagtgcagtgggagtggggcccctggagccatgtgtcagcctgcggtgagcagcgcagcaggaggcagaagccctgtcttgctgagggagagtctgtgctgctgagtggggctggcacaggtgaggggctcatggcagcagtgctgccatcactgtcctcgagccctctaagtcccaaagcgcgcctctggggatgaaggcctgggcatgaccccaggagaggtggcaggagccagggtgtgcacagcagcccgaggctcacctttttcaccaggaggcagacatggtggccctggatggagcggctgtacatggaggcgcaggagtccactcgctccacaactgcaacagagcgggcagtgttaggcttcccggacattgcatggctgcagccccacccccagagcaggggccaccttcttgggctgcccttggccacagcttcaggaggcctgtaggagcagggtgtggccctgagaggcctggggtgtggggaatgcagcccccgcaccagctcccaggcctcggggccaccagccacccgggatcccaaagggtgtgagtttgggtgggagggccacaggcccggctccaataggaagggacagctgccgcgtgcgtgaaagccccgtgcaatccatcagcccctcactctccttaccggaaaaatggtggtgaaaacagatcttcgccagaagattctggaaggacatccgaatgccatcgactttgattgagctcatgctcaagtccccagactccagcaacttagcaaaggcgtcactgtgggagggacagggaggctgactgcggtggggccgggctcctcaggcttcctggcacagaggccaacaaaacctgccacacacgctgcgcttggacaccctcctgtgtgtctgggccgggaggtcttgggggtcctggaaggtgtggctcattttcatgtgcggaagccgtcacacccagaaactgacaatgacttgtctttaaagaggtcacagaggtgcctgaagccatgggatgggccctcctccgacaaggacggatgtcctgtaggaagggactggggggataggctaggatgcaggcacgcagaggacggcctgtgaggactcaggggggagggggtgccgcacgccaagccgtgccgaggagaggc

SEQ ID NO: 479 - DNA, 894 bp, Homo sapiens
cttgtctaccagactcacaccaagacagttccagaaaacaagacagggcagcccgaggagcttgtaaacttcctcttggcatgtctgtctcctttcagaagcaacttctccaagaagttctccttctaccgccaccatgtgaacttcaagtcctggtgggtgggcgacatccccgtgtcaggggcgctgctcaccgactggagcgacgacacgatgaaggagctgcacctggccatccccgccaagatcacccgggagaagctggaccaagtggcgacagcagtgtaccagatgatggatcagctgtaccaggggaagatgtacttccccgggtatttccccaacgagctgcgaaacatcttccgggagcaggtgcacctcatccagaacgccatcatcgaaagccgcatcgactgtcagcaccgctgtggcatcttccagtacgagaccatctcctgcaacaactgcacagactcgcacgtcgcctgctttggctataactgcgagtcctcggcgcagtggaagtcagctgtccagggcctcctgaactacataaataactggcacaacctggtatcgccagccttaaggtgtctggagcccccacacttggccaacctgaccttggaagatgctgctgagtgtctcaagcagcactgacagcagctgggcctgccccagggcaacgtgggggcggagactcagctggacagcccctgcctgtcactctggagctgggctgctgctgcctcaggaccccctctccgaccccggacagagctgagctggccagggccaggagggcgggagggagggaatgggggtgggctgtgcgcagcatcagcgcctgggcaggtccgcagagctgcgggatgtgattaaagtccctgatgt

SEQ ID NO: 480 - protein, 219 aa, Homo sapiens
LVYQTHTKTVPENKTGQPEELVNFLLACLSPFRSNFSKKFSFYRHHVNFKSWWVGDIPVSGALLTDWSDDTMKELHLAIPAKITREKLDQVATAVYQMMDQLYQGKMYFPGYFPNELRNIFREQVHLIQNAIIESRIDCQHRCGIFQYETISCNNCTDSHVACFGYNCESSAQWKSAVQGLLNYINNWHNLVSPALRCLEPPHLANLTLEDAAECLKQH

SEQ ID NO: 481 - DNA, 1303 bp, Homo sapiens
gcaggggtctcccagactcggtcccgcgggctttaaggggcccgggcggcgaaggcgcacggagccaagttccgggcagcagccctgggatgccctgagccgggccgggcggaggtctccgttgcctagcaaccggggccgcggcctgtgggcggagcctgcaccgtggctgcgacacggggcggggcctcagcgggagccggccgaggagcgggcaccggccattggcacaggcacgggccattggcgcatgcgtagggcgcggccttggggcggggcccacccagtggcggagtcttctgaggggcgggtcgtgggcggggcctggaggcggagccggcgccgtcagtagtcggctgaggacggaggcggggctgggcctgggatggggcggggcctgcgctggtggggcgggcgggggaggagacacggccaagcgcccgagtgggggccgttggttggtgcgcggctgaagggtgtggcgcgagcagcgtcgttggttggccggcggcgggccgggacgggcatggccctgctgctgtgcctggtgtgcctgacggcggcgctggcccacggctgtctgcactgccacagcaacttctccaagaagttctccttctaccgccaccatgtgaacttcaagtcctggtgggtgggcgacatccccgtgtcaggggcgctgctcaccgactggagcgacgacacgatgaaggagctgcacctggccatccccgccaagatcacccgggagaagctggaccaagtggcgacagcagtgtaccagatgatggatcagctgtaccaggggaagatgtacttccccgggtatttccccaacgagctgcgaaacatcttccgggagcaggtgcacctcatccagaacgccatcatcgaaagccgcatcgactgtcagcaccgctgtggtaagcaaggctccgtccaggctgaggggcgtgccggtggcagctcggggccctggaggctgaggggagccctggcggctcttgtacgtgtttcaggcatcttccagtacgagaccatctcctgcaacaactgcacagactcgcacgtcgcctgctttggctataactgcgagtagggctcaggcatcacacccacccgtgccagggccctactgtccctggggtcccaggctctccttggagggggctccccgccttccacctggctgtcatcgggtagggcggggccgtgggttcaggggcgcaccacttccaagcctgtgtcccacaggtcctcggcgcagtggaagtcagctgtccagggcctcctgaactacatg

SEQ ID NO: 482 - protein, 233 aa, Homo sapiens
MGRGLRWWGGRGRRHGQAPEWGPLVGARLKGVARAASLVGRRRAGTGMALLLCLVCLTAAHGCLHCHSNFSKKFSFYRHHVNFKSWWVGDIPVSGALLTDWSDDTMKELHLAIPAKITREKLDQVATAVYQMMDQLYQGKMYFPGYFPNELRNIFREQVHLIQNAIIESRIDCQHRCGKQGSVQAEGRAGGSSGPWRLRGAALVRVSGIFQYETISCNNCTDSHVACFGYNCE

SEQ ID NO: 483 - DNA, 61396 bp, Mus musculus
  misc_feature (1)...(61396): n = A,T,C or G
cagaacaaagaaaggcgtaaatcaaggcatttaaaaaatgcattggtggatatatcagataagggggaaattttgcttttggccttggatgctatcagataatatgagtatgcccttcgattggtagaaaagtaagctctttttacattatccaaaactgcaaaaatctgaagttggttttttttaatctgcttatcagtatgctgttttgtgttagttacaggatgttagatccggtacagaagagaatgaggaaaagctacttatcagaggaaagatcaccgatcactggacaaatcgtaaccaggctctggacctgcaacattccaacctctccacacagcgcggtggctctgattggcccttcaacctttacaaacacagctgctttctaggaatgccctcccacactagcaattccatcgccctacgagctaagatctggcatcttcgagtgccatgcaagcagagattcaaagtcaatgtctcaaaactaaatcactttttctttatcttgagacacacattctttttcctttgtttgacaataaattaggatgctttgttttttggctttttccgcctgtctatgactccctcttatctcttgaatcctgttatttattttttccacctgatgatctgaacactgtctaccttttatgtattgctttccaatataaatagttttgggtcaagaatatgtatggtctttctgagcattgtcccagagttgtaggaataggtagaaatccatggttgttttttatttgtttgtttgttttttgtaaaataactcatccttacaacatatatgttaaaaacccccagggttgcgtgccatccgcagtgatctattatatccggacaagagctgcccttggtcttctaattaataatacccgcaaggctacaatgaatagggccactttctgctcattgtcattaaaaaacggaagtcccaggatttcgcttaactctttagcaatccccagagtttccacgggtctgtggactcttcactccgcaaaggatccttccacatctactctggttgctggtgactttgcaggcactctgataaaccgccagccttgccacttctcactcttcgctattgtactcttttgggtcgtgttactggtggctttaaagtacaatgggaggaaaagaagagtaacctgagtggatttagtgcattacaaagggccagaaaaagtaggcccttgatactgcctttctgcttggggtgtcatctactccgatagtatcctgtagaagctagaccttaggtctggccttggactccctttcccgacctaaggcttagacattgcgatgatcccactgggccgagtgaaatatatcattactactgcctgctacatagtagtaacagcgaaatactgaagctagccaccataaagtatttggcagaagacagagcttagtaagttctgaaaacacgcgtggggagctgggtgtgtggctcagttggaggctgcttttctagtatggccgaaaaccagggttcaatttttagcaccatataaaccacctgtgacagtttactcctgtaattccagtccccaggaagtagaggcaggaggatcagaaattcccgactacataacaccaactttgatgtccatgtgagataaatgagaccttgtctagaagcaaacaaatgtgagagccaagtgtggtggctcaaacccataatcccagtactctgggctaaggcagagtatgaatttcagagcagtctgggttactgtgaaggtgcccggccagccaggaccacatagcaagactttgtctcaaaacaacaacaaaaccgcaaaccccaaatcaaccccaaacctgttatttagcctgaccattattctacactctgacaaccaaccacttgtgtaagtatatatgagtgtgtgcgtgggtatgttttgatgctaaacaggatctttcaacatagaaaccaagcacatatcctattatctgaatgaggaccaccgtcttgtgctggaagttttaactccttcttgttattgttctgctgaccaggaacgtgagaaacagcggaagtttgctcagttctattgcagtacaatgttcaaagagccagagggcaaagcagctgcttccggatcaaggcggagcagggtctggggctcgagacggcacccctatttgtgtgcttagcatcttcgtgggcatacaggtagcacccattcaccccagtaacaggtgcacacacacacagtttctctgaaatcattttttttttcaaaatatcaaaatgttatccaaatccttgttttgaagaatcaggtaggtatataaatagcgccttgtattgttgggtttgaagtgatatatttgctatggttgtatgcacaactaagatggaaattgatccactttttttttttgaacttctaatcactattttttgttgttgttgtttattggtttttaatttttacatttttttccccctgagctctggtcttccataacccaaccttgagttcacgatgttgttgagaatgcttacaaactcctgatgtcaagttctggggttacagggtctgtgtcatccatgacaagatcatatctgtcatttaaatggcaacaataagaactgccaaactgaatttactgaactctctggaaaacaatttacaacactgttcttgaataacacacaacctttccatgatatatatttccctgataattttaatttaattaatatgaagacaagtattatcttcattaagtcaagtatagagatgtctattagcccagttattaggaggctgagaaaggaggagttgagttggaagtcagcttggggtcacagagtcagtctcaagccaaccaacaaaagaccaacaaaaacattaccattgtaccgatgaaatacctgtatgtactgggactgtgcggccttaccgttcgtgacttctcaatttgataagatggccccgccctcttttcattattcctgtaattaccttagggctggcgatgtagttcagcagtagagcacttgcctagtctgtgtgggatgtgctggttaagagaaggaaaagagaagagagggaaaaaaatacaagatatttctaagttttttcccccccagcattgttttgtaactcagtagtaaagcatgatcctagcatgcacaaagcactattctaacatgtctgaagtatgatcctagcatgtgcaaagcatgatcccagatgccacaccacctccaataggatctgtgagacaagctccacagactgaggcgattgacctcaaaaagggggaggccctctggaaccggttgtggaactttttgccggagaaaaaatattgagcggtagttctcatggcaatctatctgttttgttttctcttattccttttcttatttacatgttcctagtagactaggccaagattttaagagagaataatgggtaagaaaccattcctagagatggggtcactaacctgaccttatccccagggaaaccaacgcttctttactttttaaatcatttacaaaactattatgatagataaaaattttcccaacaatataatttcatatggttacatatgtgtcattggaggtggattttggtatatggcaaagaaagccttaattagacagaattaaaatagtttaaatttacatattgaagatttataaaacaaacaaacaaaccaggcactagatgttaaataataattgaccatggggttagagagttagttcagctaagagcactggccgttaaagatttattaacctgctcctggaaatatgctactaaccttggacgacagctcccacttgatacatccttttagaattgttatattttgatggtttataatgatgttgcctgttctgcttgtgattcactgaacacatagtttcagagttgtaatgcttggatgacttttgtgctttactgtgccaaatgatttttgttggtgtttgtgattgtttcactggatatagtttctaagagatgtaatgtttggtttgtttgtttgtttgtttattttgttttttcgagacagggtttctctgtatagccctggctgtcctggagctcactttgtagaccaggctggcctcgaactcagaaatccgcctgcctctgcctcccgagtgctgggattaaaggcgtgcgccaccacgcccggctaatgtttggtttttttaatgtataaagtcccctgcttgagagctgcagaatacactcaggttcagactgcctctgtgtttgtttctgtttgtcaccgccgaatccttaccaacttaccttcgaggacccctcattccaggcacccccatacccgactggagtggtccgtggcacccagcatgtacaaagcatgatcctagcgtgtgaagagccccagctttagttcctacacagaacaaggtgttggagagagagctcagcggttagagcatttgctgctctttccggggacctatcggttctcagcatccagacggcagctcagaaccaactgtaacttcagttccagatcccacaccctacttctcactttcgtgggtaccaggcacacacatggatacatacgtacatgtaaaatgcctatacatatacatataaactaaaaatgaataaatctgaagcacaaaaccagaaagtttaccccttatatcccagcccccgtatacttaatttgttattacttaatttggtttggttgttgagacacggtctaatgtggccaaagctttctcctgctgccgcttcccaagtgctggaactgcagacagatatcaactcacgtagcctcctgtggattttatataatatagttggggacagtttactcgtctctgttccgtcacatccccagttgtaacgcacagacactgcttagggtcatggaggggatagtggaaaaccgtaggctctctgctcttagagggcgatctgatagaattagatttatcctcgaggccgggaacgcaagaggcaagacaggacctgcaccgtcagccctgccccacagcgcagcagtataatctatgactgtgcgcccagaagtcattcacagggtctgcctcagggttgggcgtgcagactgtaggcagccagctgcctcgggcgatcttctcctggttcagcagagcaggtgtagccttgttcagctaaggcttctttccttttgtttttttttttttttttttttttttgcttcacactgaatgcttggtattgcagatgttctgaattctgagttttcagataatgttacattgacaaaccttaattttctgttaggtgtataggagtggtattaagcattttttttcatccttaaaattaaatttggggggttgcatacaaagaaatgggtattgttccagaatcttcatgcacatgtgttatttcatggtgttttagcttgttcccctcccccactctctccattcccctcccccactgtccatcaggctcacctccctttgattcttcaatgtttctcttgttgtcaggagtcccattccttcttcctttccttacacacacacacacacacacacacacacacacacacacacacgagagagagagagagagagagagagagagagagagagagagagagagagagagagggatcgagcatagagagtatgtctttctctttcttacttgtttggtttggtttaacacaatgatttccagttcgttttcctacaaatattacaatttctctttttcattaaagctaagcaaaatgggttgtgtatgtcacttccttccttctttctttctttctttctttctttctttctttctttctttctttctttctttctttctttctttcttctttctagacagggcctcactatgtagctctggctgtcctggaactcactatgtagacaggttgtgccttgaactcagagatcctacatttgtctttctaggctggttcgcttcttagtcctaagactagctcagcgacaaacataagcgtgtgagcacctctgtggtatgctgattcagagtccgctgggtaataaccaattaaacatgttttcaattgggtagatgatccagctgttagacatgcttgtataatttgattgcacagaatattttcttcagtagatactttctgttgttactctgggaatgaaatcgaactctgttataattaaaatatttatcacttgaacctctgggtttgtactcggtcatgcgttcgctcccttacacagaatgctcattacataacacgttataaatactctccttcatcatttatgtatggcataattgttatgacttaacagtgcgatgtggttatcacagagcagagttttaaagatgttttatcatgtgtaaaagaaagaaatgggggccagcaatatggctcagcagtcacatgcactccaggctttatgaagggaattccatccctaggatcaacaagggaggagaagagggcagacttctacaagttgtcctctgctttggatactattctcctcagaaaaataaatacaacgtaataaaactgtgaactgtaaaataatgtcaaaaaaagaagtaagaaaggaaaaaaaaattcagtgtaagaaatgaggccaagatgcctgggctgcacctgagtttgccccgagaccactatcaccatcactaccaccaccaccaccaccatcaccaccgtcaccactaatcaggaaagaaaataaacaagagaagtgtgtgtgctacaggtgagctgggatgtcttatgttggggaatcagtccttgaagtgagagagtgagtgagctttcaaggaagacccatacacacgggaagcaactggcacaaactggatgcttcctgataacgtttgtcgtgacaactgccgtgcatcctttcggtgtttgtcacatggtgctacagttttactgacccactggaaagaagactagacccaggataacagatgagctggccatcaaaagcatccatcataatctgtggacatttgatgatggaatccctgacagaggctgctcttacttacagtgggctggcagagtgtcaagtctttactagcatggcttacagttgattagcatcatttatgccaccactgctattttaagccctggaaatgtggcagtagataagataaactgtaccttttcctcctagggccaactttctagtacaaaagatgaacccagaagaggtgaacacactccctgatcgttgacaactcgcttggccatgcagataataaaacccacaaaacggaccaagtctgacgggaggcagaggcaggatggtcacatgctcctaccagaatttggcggttttagtcttctcagttttagccgaatctcactgttatttaaagttacagtccttaatgacttaggttgttgcacatgttctcaatggatgctggctttgctgtgtgtcttcttggtaaatgctatgctcctctgaatatgctaacggtgagtttttcctggcatgttatcacatggtttttttttttttttttttggtttttcgagacagggtttctctgtatagccctggctgtcctggaactcacgttgtagaccaggctggcctccaactcagaaatccgcctgcctctgcctcccgagtgctgggattaaaggcgtgcgccaccacgcccggcatcacatggttttaatctcagcatttaggagtgcagaggcaggtgggtttgtgagctccatattagcttggtctacctaataaattccaggccagttagggctgcatagttagaattctttttcagactgagagggccggagggggggagggacagagagtggggggtgggtttgttttaatcacagcacgcaggaggcagaggtaggtagatctctgtgagttcaaggcaagtttcaggtcggccatgggatgcctacaaagattcttatttttttaaaaaggaaaaagaactagtatgtttgtttgtttgtttgtttgtctgtttagaaacaggctctcgtatttcctgagttccttatgatcatctgtggtgcctcccgagtgccagggttaccctgtgcctgaccttttgcatgctttcttaaaattttatttttaatttaaattgaatttggtgttagttgtttagttatattccatataattcttaaaaatgtaacgatttaataaggagatactactcaaaacgtagaagtattagtgtgttctgttattttagtctcattagatagaatacataatctagtgtgtcctgtaatactccccttaccgtgtgtgtgtgtgtgtgtgtgtgtgtgtgtgtgcgtgtatgtgtgtgggtgcgctcagggtactgaaagtagggcattctatagtgggtttttttttttttttttttttttttttttgagtttttcaagacagggtttctctgtgtagccctggctgtcctggaactcactttgtagaccaggctggcctcgaactcagaaatgcctgcctctgcctcccaagtgctgggattaaaggcgttcaccaccactgctgggctacatagtggtttttaaaaacacatactcaagtctggaaaatggtcaataaatttacaatgttgcaaaaatgcaggagtggatttcccactttttagtgtaggaagtttatcattatctcagacttatttgtgacttacaaaggtatgtagcctcattcagaacaatgagaacataaatgtgtgctaatgggtaatacaacatttgatcattcacaagttattcacttgtactcagccccggggaggccagaagtcaaggtgaaagtcacctccattgtctccgtcataaaaggaaagcacaagggcggaccaaaaacttgtagatgatccggttgccagtatttctctaacaagcaaagagcagagcctttctgatacaggaggtttcatgtagccgtgcgagtcccaggacgcgctatgatttagcatgacagatctaattttctttccttccaattccctccgagtctctaccttatataaccggctttgaataattctcagcaacgtcaactatctgacccttaaaatgagtgtttcagtcgtctattatcggtcggctgatgactaagtatatcccgggcaaacctggaactcactatgtagcccggctggtttggaactcgtggcaatcctgccttaggcacctgagaactaggacaggtataggtcatcacaccactgtcaccggtttactctcactttacgtaaagtttgccccaaatactgtgatttctatgtaccgtcaaagggaactgggttgctgaaccaagcaagcatgtagttctgtgcacacagcttcaggaacaaggcgagcaaattaatccagcttggccggttgaggccaggctaagctcacagcttaaatttagggttatttcaggacgtgccttctgcgtcccgtaagaacgtcagccctaagtaagcagagcccacgaccctagtgatctagaaaggtgacgcttccttgactcctgacagggctgggtagcactccacagctcatcggtagagttcgaaagggctcggcagagctcgacagcgctccggcagagctcggcagaattcggtagggctccggtagcgctcgggcaaggctcgttagagccccggtagggctcggcaaagctcgacagtgctccggcagggctcggcagtgttcggcaaggctcgtaagcgctccggctgggctcggccgcgctcggactccttcgggtgcaggagcccagccaaccccacagtagcggagtgcctggcggtgcgcgctccccgagaccccgatccccaagagccccgaggcccgcccattgtgccgcggggttcgccaccccgccagccgcctgacgcagccgaggctccgcccccggcgtgacgctagcgtcaggccagtcccggcatgcttcgcggccgcccgcggtctagcgcactgaggcatcttcccgagagcggccgtgcctccgcgtctctgcactgcgcaccccgtccggccgcccggttgcccccgccgcccgcccgtgcgtccgagcggccgcagccctccgccgagggcgccccgggacggaagggtccagcagcctgccggcgcccgccgcgctcgtggtcgccgtcgccgtggtcgtcgtggtcgtgtccgccgtcgcctgggccatggccaattacatccacgtcccgcccggctcgcccgaggtgccgaagctcgacgtgacggtgcaggaccaggaggagcagcgctgccgcgacggcgccctgagcctgctgcggcacctgcggccgcactgggacccccgggaggtgaccctgcaggtgaggccggacgggcaccgggnnnnnnnnnnnnnnnnnnnnnnnnnnnnnnnnnnnnnnnnnnnnnnnnnnnnnnnnnnnnnnnnnnnnnnnnnnnnnnnnnnnnnnnnnnnnnnnnnnnnnnnnnnnnnnnnnnnnnnnnnnnnnnnnnnnnnnnnnnnnnnnnnnnnnnnnccccgcagcccatccgcctcccgcggtcctctccgctgccctccctcccctgggcttccctcccatccctgccttatccagcccgagatcttcccacatccccatctccgagccgcgggagaacaactcctttccaaagcggaatgaccggggacctgctgctgcccacgccaggatgctagggaacgctatgccgtgcgttataggaaggcttgaattggaaggtttctaaatttgtaaagtcttagaagaattaatgctcagggttggagtgagcagtggcctgggaatattttcgtgagtcagtggctttaaagacaaaaattctcagaaggatacccctacccccgaaaagctaggattaggaaaaaaaaaaggcacttgcaagttatgatccaccatacccacaatttatctggtgtaattggttatagttttttcagtgcacagcttgtaggattactaaggtgaatttcctttttccttgcaaacaagccaaattagtaaaattttaacggtttgggattgttttagatttgagcagtaatttgtattattcaagacgtctgtcattttgatgactccaatacattgttgggggtttatacaggatttattgatttaagttttttgctaaattttttttttagtataattaaaacatgagtagtgtctaggccccagagcagttcctgacacttgggggcttttatgagttttagtttcgattcttgttagaagtgttctgagcagctgaaagagaccgacccatatgttttggggaagaaacttgttagacaaaagactttgacatttaaggtgtgcctgttggccaagtatataggaaatagttgattcaaaatgatttttatgtataacttggaagattattgcatttcctttaaggaagtgcttttcaaatggaagcatatctgtttgtgtattttttgcagtgctgggaaaggcagctctggatcctaggccagtgctctacctctgtatgtagccctcatgttagactgttaatatagtgtattcacttgcttgtttgagagggttttaaaatttaataaaatctatttctggaaaatatcttactaattaaaggcagttctgcttcctggtatactgcagtgctggcaacccatattgttttttagcagtgactttttcaagtttgaagcttggaatttcctttcatttatttgtgtgtagaaagtggtaatagctgtcgagtgaagtgctgtctgctggattgggttgagctctttttaaagtcatcgttgcctaggaaatcctaggtaggtgctctctcttttacctcacgtgaaatctagtgaaggaaagccagggtaaagaaggacttaaagctattctgactgttatataggagatgagggtaaatcatgacttatatgtatttttctttttccaggcaaggtggctagatccctcactcaactggcaccccattgtggtggggttgcaggtttttgccaccattcctgacctatgctgtgactatgaactgtaacctttgggttcataatctgaacttatgtgtatttaacagatattactcacttctaaaatcaataattagaaattcatcccctccttgtgcaagcagaactcttggatcagaagcggagccatcagtaagtcaaggctagggttctttattctgccccagctcctagagggacttacatatgctaggacactgcaaaccagtggtgccttggggccttgtttagtaattccaattttgtcattatttgtattcttttgagacaaggtctcactgtagctccatccggtttggagctggctctgtaaaccaggctggcctcttgagccttgggctttaaggcttttgtcactgtggcctgcttgtttagtgttccttaatggttatagtttcttttaaaattttatttctggaactgtaaaagataatactcctacctcatttctgaaagggaagcacgcatcctatagccaaaagagacatgtaacgtcatgtcagctgaagcagaatagcctgtttttttaaggtattctcttccccctccccctttgtatgaggctctggaaatgcaagcttgagcatagagcatgctacgcaagctttctactccaaactctcactgtttttttttttttttcctcccccagactaacatttttcttggctgtatgtagtggaggcaggaagatcaggagttgaaggttattcctgactttacataaggagttccaggccagcaggaaaaatatattaaaaacgtatttttatataacatattttagaagcttttgtgaccatccttatctttcctggtagttactcctataatatcaacatgtggaatgtgagaaaaataaaaataggcccaaaacaaagagatttgatggttccctaaaagatagtctcttcttagaactaccagcttgggaagttgggtctcaatttggatagagctggcctttcaagtaaaaacactatagggcggggtttcagaggttagatttctgagtaggtacagtagttctaagacaagactagctaaatgctttctgtttcatgctcctttgttttaaaatcccttccaccccatattttcctttgagggagacaggcaagaactgtaaatgggtattgcagttggtaaagctgagtatgagtgtatgagtggcagatctgagaggactaccttaggaatactgccctttgacctagaaaggctctctctctctctctctctctctctctctctctctctctctctctctctctctactactgtgtgtgtgtgtgtgtgtgtgtgtgtgtgtgtgtgagagagagagagagagaggattgaggctacgcctgttcaagnnnnnnnnnnnnnnnnnnnnnnnnnnnnnnnnnnnnaaaaagacaactttgagcgcacttgaacacatttgcatttccttctttgggtgctacagttttagaaactgacagacaccttttgttatgcagcacttccttcttctgagtttggggtttttgatggtctacagttttagggatagttgtcaggatcaaagacacttaattgatttcccttcccgttgcctttttcttagacatccctgcctcagcctctatggcagggggatttcaagtttataagtacagtgcctagacaaaatccttttccctttgaaaaaactgacttagtttcttgaatatttcagtgggtcgctttaggactgccccctgcatcagcgtttgagcaagactgtcattaactgacatgccactctgtaaattcttctttagcttggggtccccagtagataatgatataatggcaaagcttgctaggctgggaagaccatatttttgttacagatgatgtaaagttaacttcagaggcggaagcccggaacgccttgagcaggtggactcttccagcccagggttcagtgagggatctgcgttaatacatccatatgctggagtttaaccatgggcttccgcacacacacttgcattatgcctgcacgtgcatgtaccctcacacagaagaatgtaagtttgtgcaccgttcccattaaaccccaacccactccccagagtctgctctataggatcccaggaagcttggacattggtagcttatggctgttcagtattttcagtagccgacttgagcatgggggttgggtcttcattagctttgtcttactgctcaagtttcattctttttctttttgagacagtcttactcactgtagcctaggctaggtggaacttaaaggcattccttccaccctagccttccaaatgttgatatgacatgtgtgagccacagaacgtgcctcgtggtcaaatttgttcttctttcttttcccttcccttcctttcccttcccttcctccccttcccttccctttccttttctttctgagacagtgtttctttgtatagcctaggctgccctagaatgagctcggtagaccaggctggcctttaactcgagatccatttgcctctgccttccatatgctaagattaagtgtcaccgctgtccagctctggtcagtttcttagcctttctaagcttcattctccatagctataaaatggatccaataaacagtttcttaccccctgaggcttgtgagggtgaaataaatgctagctcatgacagttacgctgctgagcacaggctgggtagggcctgaatcaaaaacatatgttatgttcttgaaagtcccgccctagacaaatcagaatatggaacggttttgaatgactgctcagatttttttcacacgcagagatggaacaaaaacactttagaagtgtactactcctgtaagacagatgagtgcattttcccagtgctggtgagctctactggcacgaggcagtgctcttacactcaaaccccatccccagcttccctcatccacatttctggatggttttgaaatctccctgctttttaagcattagctaagttcataattctaccagataaagacgacttccttgcgggctccacttagacgctgttcttcaactttgtttctctgctgtcacttaagcctacttgtctcttcctgttcctgtcttagatgtcttagaagaaaagttcacaaggatgggagagattatatgtgatgcttgacaccggccaaaaacagcagtgtttgatcgctttcagacttttaaaaactaaccgtggattttactgtgatgtagtggtttaactgtggtctaaattagagacaaattgtagtgacttttcagataccaacacttcataagcaaaccgttttctctcctttgggctatcactgtcgtagtgggaagaggatggctttgaaatcattttgtgtgtgtgtgtatttttttttgttgtttgtttgttttttgtttttcgagacagggtttctctgtatagccctggctgtcctggagctcactttgtagaccaggctggcctcgaactcagaaatccgcctgcctctgcctcccaagtgctgggattaaaggcgtgcaccaccatgcccggctttgtgtgtgttttttaaagacatgtttctctgggtagccctgtcctggactcaggctggccttgaacacagacatctaaccccctctgctggaattaaagacctgtgccacccctggtggttggcaagtattttaactaatataaaaataaagtatttggagaagtcttacagtatttccatgcctgtttgggttacagaataaagtccccccccccccaacaaaaagaaccacaaatgaaagcacacaacataggaaggtgctgtgagcctatttgggaaatgaagtgacgggtgcttcagtgtggtgctcctgtcttacctcccagggccttcattggtaagtggagattgaacagaaggaattaacatgtttcagagtgtgtgcagcccaggggtcagatttcagtgccacaaaaagaagtgtcacataatacagaggaacattgagagacatttttgtggtgttaaaaataccagctgggagtagagacacacacacctttaatcccagcacttaggtggcagaggcaggcagatctctgatttcaaggtcaacagagtaagttccaggttccagggcagaaagagctacacagagataccctatgtggaaaaaaaacaacacaaaaaaagtaaaataccagagtgaggcgtgccccaggtcacctgtgtccctagtacatgcatgtttctgactgcacaagtgaagtgtttatcagagtaggaagttactctgcccatctcttgagaatgttagctgaatagaaaactatttacatgttgataagttttcccttcccagctctttgagaagctggcattatctgtctgcatcctggtgtgggtgcttctcagatcacatgtatcattagaagcttcacacaaaagcactagggccccttaccatgcatggctgtggatggattgtgtcttaagagttgtcaaaccttgggggggaaattccctggtgataatcaagtcaatcccctgtgcacaataaatgacatagtaagctaagcaaagatcagacggggtcatgtcaagactctaaagtgcaggtgacacctcctaaagatgggttctacagattgactccatgtgaccccttccataaagacagtatctagactgactgagaaaaacagggttactgtaagggtctgggagaatctggtgtggtctctggccatttaggtagagccaaggtcaccaggcagttaaccatgtcagctcagccttctgggtggacaacaggttatgcatctctctgcctttgaaggaacaactatgcgaacattccgggttccctcgtgcttaccggtgagcgcaggacctccatgcctcccacacactgcgcttttaggataaatgtgaattggggaatgaatgacaccttggatgaattttgaaccctacaatatacactagtaaattgttaagtagagcctgtgggctgagacaagtttagttttatgtatgtgtgcatgcctctgtgtatgccatgcgtgcgtgcatggacccatggaggacagaagtggtgttgggtgccctggagcaatgtggttctgggaatcaaactcttgttctctggaagagcagctctttactgctgaggggctggccagatgactcactggtaaagaaaggcacttgctgccaggccttgttcactgactttgaatcctactatgtgctaggagaggactggcttctgcaaactggtctatgaccttcacatgcactcatgctacatatgtgcccttgcacatgggagtgctcatgcgcgtgcacacacacacacacacacacacacacacacaggtaatttaaaaaaaaaaaaggtttttgaaaagatgacttagaataagacagggccaggcagtggtggcgcacgcctttaatcccagcacttgagaggcagaggcaagcagatttctgagtttgaggccagcctggtctacagagtaaggtacaatacagccagggctacacagagaaaccctgtcttgaaaaacgaaaaacgaaaacgaaaaccaaacaaaaaaaaatcagtgacagacagacagacagacagacagacagatatacatacatacatgagggctggggagatggctcagcagatacaactcagataaagcttgctgctgtgtgtgaaggctggagtgttgacttcccagtactgtagacatgttgagtgtatttgtaggcctggttgtaatcccagcactcagaagcttagagatgcattcctggggcaagccagccagatggggtcagctgagagaggtttggtaaggaaaaggagtggctgaggaggcctattgatcttgggtctctctgtgtgtgcctgcatacttgtggatactcacatatgtgccacacatgcccccaaaagaaatacatctggaaactttaaattctacatgtctttaaaagtaagcttagcacatggtggtacttacctgttgggttagctctcaggaagttgagaggttgctagagttcaggaggccaaggcctgcctaggcaacacagcaagattccttctcaaaaaaaagtgggagagaaattcatgaactagttgtagttgtgtagccccacaccccgggcaagaataattccagcaatttagctttatttactttctggtcttaatcttgccctccctctagtggtggccacagtagtagcgtctctctccttcctccctttcacaaaatgaattcttgtggattggtcttattttgaggacagcatggtctatagtgagttccaggacagccaggcctatgtaaggggaacctgcagctatgtaattttatgttttatgactggtcgtatgtagcccaggctgcccttgagcataagctccgcttgcctctgtctcccacgtacttgggtttccagtgtttgatcatagtttgccctggtactgactgacttctttaaccctgttgaagctgtttccgtgttctgatagttaaagctgttctagcagactgcttgtttgtctgtctgtgtgatttggatgagttttctccgtctttccatagggtgagttcttactggaatagagagatggtaactgtatccgccttctctggagaaggaagtcgtttatacagtggctgctaggtctgcaaatccagagacggtaccatgcagctcagctgcggcttcatagtgcagtctcgaagtagaatttcttcaggaatgcttatttttgttttgtgatcctttggctaattagatgagatcacctgtgttatgtagaataataagacaactagtgtgtactctccccatgagcagacgcttctcatggtgatacttaaaaacaaccgagcttttggtccttatagctgtgtacacagctcagccacctcgcttagggtgttccattatgagtgcataggagccagttctattcattttaccagctagctgctagtccttggaatgaggttgcagcatagcgtttgtcaccgctgtcaaggactcttcatagtgagttctgggttctccagtatcccagccataactggcttgtatgaaaatgtcctaaatttgccctcaaaataacccacaaaataagttattacgtacatacatacatacgtgatacatatacacgtacatacatacatacgtgtgtatgtacacatacacaaatattatctgaccttgtggtcttagtttgtagtccaagctagcctataacccattttgtagcttaggctggcctcagactcttgtcacttccactctcctaatgacttaggaaagaggcagctcctctctccttgcttgcctggtccctggtttgccgacttcctgcctgcccttagttgtcgtcttggttagcagggagctgtcacccaagtgcaggttttgtcttctgtgatgggtctgagatcagcagccccaggtcttgtttggctcagtctgcctccattcgttcttcttgttctgccggccgctctttcttttgtggtagtgtgcctcgctgccagggagtcaggtgctttctcgtgctttgcacatagttgtagatagagtaagccaactcttcaggagttggtcctgtcactgccggattctgctcaccttgattgcaggctagcagtcggcagtattcagccagacaaccctcagtgctctgggagtcagcactttctctctcattatttcgacaggaaatgaatgacttgggcttgtgttgctgacctaaaaattcaagacatagcatccatgaggtgtgagtggattctgttactctgtgccttcagataaatacgacatctttaccagtggcatggttttctcgtcctaaaaatggataacttcctaggttgagtccagaaccacaatctattgagatagtgaaaaatctgtcaggcaggagcaaagcttcagtccttcgctgtatcctcacggatgtctgtggggatgtttcaggctccgtaggttaaaggtcttgcatgtaactagcctgtggacatcctctcctctcctacaatttcggtgacctagataacccactgttagtacagtagggaatgatgcccggtagtctgtgctgtgcaggcaagctttcttttcctcagatatttttgttccagggttgtttgaggccacagatatgtaacccatagatgcaggtgactctttctctgtgtataaattaaatacaagtgcatatgtttgtgtatacatgtattttccttctttaaaatagtaaggtgtggctggagatatggttcagtggttaagagctctgactgctcttccagaggacctgggttccattcctagcacccacatggcagcttacaaccatctgcaagtacagttctaggacatctggtgtcttctgcaggtactaggcacatacatggtgcgcagacatacatgtaggcagaacacttatgaaagagctaacaagaaagccagactgagctgagcatgatgtcatgtctgtatcttagtgctgaggaagtggaggcggcaggattgagttcagggtcatctttagcctcatctttatcctctagcctgggctacattagacccttcttaacaggcagtcttagtatagtcagtgtattcgtgttttgttattgaggtatatgtattgaatttgaaaatgtaaacaatcagcttttcatttctagagaaaataaaatttagctgaaataccatattttgttatgtttctgtattgattattcataatttaagattttaagttttgtgttttcacaaaagtcaagttttacttttgtgttttgcacgagacagagcacaggtcagtgtccagctcattctagagtcctcttgcgttagctctgactgagggtcaccgtctcgggccgtcacacccatcctatatctgtgttcctaggagaccttgtgttctcccttcaggacatcttgttgagctttaggagcggcctgggagatgctgctttttctgttggaagcagtgagacccgtgtgcgccactgttgtcgcctgctcgcccgcccgctcttcctcagttcttcctttttctcagcatctgcacttttcctctctgtttctgcctttttttcctttctattcaccatatatagagcctgggattcctcctgctttagctttacaggcgcccacagctgccgtgttgagctctcgctctctctctctctctctctgtgtgtgtgtctgtgtagtgttgaatctaggcactatctgcatattagacatattgtataccactaactcaatgcctcacctgtagtttcttgtccttttctaatgaatgaaacttacatatcttaatttcacttacatatccctcaatatgtattgacaaaggcaatctcttgtggagtctttctgccctttctcatagagttggccgtggacctgacatagttacagagatctctcagcctgtgctgaacttttatcgtatgtgttaatcacaccatttcagaatcagtccttgcttgcttctttgttttgtctaagcatgtatgttatatgtccccttccaacttctagggggacagatagaacagcctctgtcttctgttgggaggtgacaggcgctagaaggccccgctcatcgtgagggctgacaggccctgtggaagctccagtcgctccgtgtgttctctgacctaagtattgtccactcagtgcctgattgcagtgtgcttgtgcggatcccaatcccaggttacggcggactgacgatggaggacacttgcacttgatggacagcctgttagtgcacactcctctgtccccgcccctttcctttctcttccaagatagggtttgtagtctaggctggcctcaaactgagtgatgggattaaaggcaacgactaccacggctgtgacccgatgtctacctctcatagatagtttagatgtgcatttgattaatttctaattgatttggtcatttctaaagaagttaaacgttgtaataaaaataacagttcacattctctgccagtcataggacctgaggtgtgtgtgtatactgtgttgtcatgtggctttccaactgtttgagaaagtgctcttgaatgttaagcttgcagcattactgagtgagacctgtgtaatcaagccagtcagttggtaagctcttgagctgtggagaggaggaggtgtgtccaggtggatatggtgtataatgtatgagtgttgttgattgcctacatgtaatcatttttctctactttttgaaaatgaggatgtgagtggtatgcccattctcagccatgattagggtatttgtccttcctggttgtgctacatatatagttaaagatactggcatctacagatttagatggtaacccttggactggggtcgtctgaccagtcttagtaatgtcgtgcatggatgtgctccccttccaggtggcagcaccagcttcctgtggacctagcaagcactagtttccctcatactcagggttttaattggattgttgtattcttctgcatttaatctattacatagattgttgccctttcaaacttgttctgcagggtgttgtagggtaggtggtaggtagagcttgagacagttactctgtcttgagctcactatgtagtgcaggctaaccttgaactcaggctccttttgagtgctgctgttatagtgtgagtcatgacatctggcttttctcagacctctctgttccagttcttttgtgtgtatttgtggccatgaacatgctgtgaccgtcagcagaagtcagtgaacactctcctttctctgctgcccccccccccccccggctccccctaacttgaagcccagtgtcaggtgtgctgctgggtgctcctctgtgctatgtcaatgaatagagctaatcctttaaaaagcttctgagccctgtgtgttcttctccctccttgatcttattgccatgcattcatatcgggctagtctgtcttccccaagtggactcactcactcctcaagtgccttccccagtggtgctggggagcaaacaaagcttgtctgctgaggaagcacactatttctgagggttctccaaaaggcttttgacagtcaaaagtaggtatgtttctgagctttggagattgagccccaagtctggtggatactaactgtgtactctaaactatacccaaacttgtggtgtttctttccagttaacattttactcacggtatctttaatcccggccttagaaagtcgagtagcatttctctttcttttcttgtcctctggcagctgttcacagatgggatcacaaacaagctcatcgcctgctatgtgggtgacaccatggaagatgtagttctggtgaggatttacggcaacaagactgaactgttagtcgaccgagacgaggaagtgaaaagtttccgcgtgctgcaggctcacggctgtgcacctcagctctactgcacctttaataacggactgtgctatgagtttatccagggcgaagctttggacccgcagcatgtctgcaacccagccattttcaggtaaatttgcaaattttttcttttgaaaaagaatgctatgcacactaaagaaatattaataaattaaaaaattacacatttagttttcatgtatggaggggaggaaggagaggagggagaaggagagggggcagctagaggtgggagggaagggaggatgtatggagagacaggagaagggagagagagaaagagaatatgaatgacgagagagaaagagacagagacagagagagtttgagtgtatgagtttgagtgttttttgccacagcacattgtttgtggttagtggaaaacttgcttgtgtgagttttctttttccctgtgggtttctggaaccaaattcaggccatcagaattgcacagcaagcagtttacctgctgtaacatttagctggctttttagacacttttttttttttttggcttttcgagatagggtttctctgtatagccctggctgtcctggaacttactctgtagacaaggctggcctccaactcagcaaatcctcctgcctctgcctcccgagtgctgggatcaaaggcgtgcagtaccacgcctggtcttagacactttttaacagctgagtataatagtttgcaatccgctgggcgtggtggcgcacacctttaatcccagcactctggaggcagaggcaggcggatttctgagttggaggccagccttgtctacagagtaagttccaggacagccagggctatacagagaaaccctgtctcgaaaaaacaaaaaaaaaaaaaaaccaacaaaacaaaactagtttgcaatcccagcaggatctgttcaaggccatccttcgctacctagttgggtgccagcctggactacatgagaccctgtgtccctcgcaagaggaaagtgtttgaacaccagcagactttttagtgtttgatccatgtataccaaaatctcctatgttagaagttgaaacattttagaatataaagactgttaagtggacttgttttagtggttggtgtggtgacattagcagacatcgttcactcgagagaacgagagtgggcctgggagataatataatgtctatggaagagctttaccatggaacattcctgagaggagtcctgggttgtaccttaacatttttagagtgaaaactaattagaaatgaaacctgtcatatcatttgcctgtgctgaaagtctgttaaacactatatagaaattttgtttttctaatgaggaaggatctcatggagccaggctgacctcagacttactgtaactgagggtgacctggaacttgcgatcctcctgcctttatctttgagtgctgggatgcaggtgtgtgctaccctggtctttgtttgtttttgagacagggtcttataatgcagtcttggctggcgtggacctggctgagtagatcagggtattcttaagtgcagtccctgcagtgcacacagcttctgccgcactcactccttcatcctcgctgatgtgatgtcctcattccccatgcagatcccactcggcctcctctattctgcgccaggactgttgagttgtcttcagttcctcacactgaagtgggtgacatgtcagtcgggagtttgcagtcaggagacttactttccaaacgtgatagttgaaactggacatagggagtttatggtttccactttgctgatactagcaggatggtgtgtgtgtgtgtgtgtgtggggaggcatgttgaaatggtaagttagacgtctcgtggctttcattcagagtatactattaaagctgccttgccacctttttgagttgtggacatttgggcatagagccaggccgctcatcttcactgaggtatgggaatttgctgcctcggtttcctcatttaaaaaataggaataatattaagtttatcagtgcagaaacacaggctgaatttctatcatctaaaatgcttcaggctggaaatgctgctctaggtatttttggccgtggagtatttgcacattcataatgtgctgctgtctttggtttgaggccaagtttcaacacagaatccatgtatgttgggctatgtacctagagcagagcctgagtgtagttgtatacagggttttcagggtgtcacatagtcagcagtggaatttactatctgtgtcctttttctaaggatgctcaaatcaacttgtatgtgtaggaagtttagaaagtgttaagtagtgtgtgtaaacttctgtaatatttttcttatgtcttcttacatgttagccagactgcagttctaacaacttagatactaagaagctactaatgctattttggccaattgtcatagataagtggctgcctctgatatgcttttggaagcatgctcttctaagttttcagctgagtgtgctatgtatgtggagttggttctacttgggaagtggaaggcaggaggctaaccttgggtatgtgaggtttttttttttttttttttttttttcccctgtaaagtagctgggaggagactcagtgggtacagtgctgttgcacagctgagcaccagagtgtgcattcccagaaccactcaaatccaggatgctgcgcacacctgtcaccccacttctgggggaggaaggtggggacagttggatccctggggctccttggccagttgagcaaaagtagggaacttcaggtttagaagacgactatctcaaaggcagacaaaacgtcatcaacgaggacattcctgttgttaccttctggcctacgcattcatggcaggcacacgacccgtacctatgacccctctccccaatttacaaaacatttaaattcacaccaaactagatgtatgactagatgtatgccttttgatcccagccactcagaaggctgaggggggagtattacttgaggctaggaatttgaggcttgggggctcaaaaatagcaaggtccgcagacactgggcactgagccctctcggttaggacggtgctcagaggacctgtccagtgctccgagtgcttcccgactgacaaacctaacttaaattaggtgacacgaggtgatcagaagtccagggtcatccatcctctgctacttagtccgaggctagcctagggtatttgatctcaaaaagatcaggcaagagtaattgtacaaacttaaaagtgtttatttaatcacaactttgtgacacttgattctctgtgtcttagtttgaattgttctcaagtatttttgtgtgttagggtcatcggggaagctttacttattctcactcattagctagaccccaagcaagcccattaaatcagaatttgggaggatggtaaattgtttttagcagtgctgcagctggggaggggatagcgtttgtcttctgggatcatagttacagtagtgataaactgtggccaggatgggatgctacgtggtcagaaattcctgagtagttgcatcaggagtcaaggatgctgtggccatagcaagcagctgtgaggtgcagccactgtgtgaggtggaggaatctggaaaggtttgcaggaagcagccaacttgacctggcagagttactgtcaaaatggagcttagaaggaaacccctagagcagagcctgagtgcagttgtatacagggtgcagaaaggcgtggaagacagttgaggaacctggctaacagtgacacagtgagaatcttttttaaatagactacttaattatccttaatttaaaattttgtttttaaacaggctaatagctcgtcagcttgctaaaatccatgctattcatgcgcacaatggctggatccccaaatctaacctatggctaaagatgggaaaatatttctctctcattcccaccggatttgctgatgaaaacattaataaaaggtaaattactttggtatttgcatggctttgcccttactatgtactgaaagatagtgctggtgtgcattcctctctgtattaaagtgaacagttgttgactgtggctctcaggtgacactgcagcaacagtctcctttctcctcgccctgttgaagcgtcccctccccaccctgaccctgaagaaagtccctacacagtgaggggggggggagttgctgcagacacaagtattcatttagacgcaattataaagaacaccagcagagggcacagcggcaccaattaccgtaaaggtctagaggggtagaggtgtgggtatgggatgggactgtaagaatttaggccatcttaatttactgtgtttatttaaatggtagattattagggtgaaaatttaccttctgagatcttagctctttcacattgactaccaagttcagactgcaagtgttggttcatgttttatatgggatttttttagattagtcttagaatctaaatcttgaatattattagtagtataaacatggaacattttattaggtttctatgtaaagtgtgttaaggcttttgctttgtgtaggaattctgtttccagaacaacagaagcaagcatgatttagaagtgttgacagtgtgcttacccacacgtatgcacacacacccagaatctcttaagcacatgtgcacacacagaaagaatattgtaagtggtctgggaagcagcagactgtgggtccagcttggcaagtcctcagctccatgtccctgtcatgtccccttggcaagtgctcagctccattgtgtcatctgtgtaaagggaccggactactgtaggttattagctgagtttgttggtggtctccccatgtagataatttgtgtggagggtaaagggtactttgatagactttggatgaagaaccaagaggccaggcagctctttgggaaggagtgactagcagtccgtgcctggagggcatgtggcaagctggaggaggtcgcccattctgtgccattatattttctattaaattttatgcaaatagataacctacatccatacttttgggttcctcctttttcccaggcacccttctattaaccctcgtgcttaaaatctatgttaagggggctggtgagatggctcagtgggtaagagcacccccgtaatgagatctgatgccctcttctggtgcgtctgaagacagctacagtgtacttacatataataaataaataaataaataaataaatcttaaaaaaataaaaaaaaatctatgttaataattttttttttaaaagaaactttctcctcagttgcactgaggcaagtcatagctttgttgttgagatgaagtagttaatttgagtgtgtcatctccatcttagatggtgctctagggttttctgaagataactcattttcacctttccttgcttaaaataaacattttcagtctgtaactttaaatcatacactttgtgtctcagtcccctcgcctgtatagagtggcagttagcatcaggtgttgagagtggacaccacagctgctcactgcttattctgtcccttttagtttctgctctacagtttaactgtcttatgtttaagttgactataaaggttttctttattcaggttttggaacactttgatttattgttgaattcaggaatatgtgcttattcaatagaaagcatttgaggtagaattttaactttaaatttgaaagaagtgtcaattagataaacaactcttcttttaaaatggaaaggttcctgagtgagatcccaagcccgcagcttctgcaggaggagatgacttggatgaaagagctgctttcaagcctgggctcacctgtggtcctttgccataacgacctgttgtgtaagaatataatctacaacgagaaacaaggtaggtatttgaccttagcagtaagtaatttgattgattgctcatatgctctttttaatggtccctcgtctttgtatcagtaaacaaggagtaaaacatacacaaagatttttgcttgaggttataaaaatcatggtaattgctattaggaatatacatatatatatatatatatatatatatatatatacatacatacacacacacataaatacatatatatggataaaatgcctttaaattgttaaaagtagttggttcttgactttttaagtgtataatgataattgtatgtatgtgtgtgtatatatacatatatatatgtatgtatatactatacataaatatacacatataaatatatttttaaaagctgtttggctacttgtgattttgaaagcatgtctgctgtaatggggagtgtgggaaatcaacagatttgctactgcactgctggatctgcgctgtgggcttagcagcattagcagccaggctttctaattcctgtgtgtgtgctgatactctagggagagactcaaatgtagcctactgcctttgttcatatttatagcaaatgaagtagtaataaaatagctttggtaaatagacttaaaatattctgagatacaagttgatactttggtgtaactttgtgtgactgctcatatcttgatgcttcctgttcacatgtaagagtcactggttgcgttattaggtcattgggtaaagtgctttgaggtttggttgctaaacagtaaacatcttcaaatattaaattgaaatttgaaagtaccatttgtgttaaaaattaataattgaagtgcttgaaactggagccactgcttttcagagaaggccaattttgaaagtagttattttgtggagactgtattttaaattaaaaaaaaaaagtgtttttatgtatatactaaaaccaaaaaatcattattattgtagtcataaatgtattaaatttcctattagtgattttatatccagagttgggactgttctaataaaataattgttaataattattgctaattttagcctgaaacccaactaaagaggcactgtcaaggatggtgcggccttaagttatattttcaaagacattcatttttcatatttgatattttaatgtggatgagagattgttttaaaaaaaaaacaaaacactgcactaaaggctgtgttttgaactgttttaatttttgtgtggaatcacttcattttaaactttaggtataccgtagagcataagtgtttgacagtgttctttgaggagttgttacggtacgggagtggtgaccagatctcaatgccatatgagatagaagcattagctgtgcttagcaggcctgctagcgttcagtgcatttgtgtaatggagtttcatggaagggacttcatcttacagtgaagtggacactcagctttatctttaactgcacgttaaagggaatttgttacttcctttggaatataggtttaaatatcatttatattttatctttttgcatatccatttcatagaacaaacttgtttataaaactaaaaataagggaccaaaaaaatcagattactttgtcataggtacttttcattaaacatttgtcagtctcagctcttgatgatttacatgtaaatcaaagagaagaattaggttctaatttggtgttagaggtcaaaatccctctccatgtctctctgtccctttccttccagtaagagttcatgttgtattgcttgctccttgtcttttgagtgttagtaaggaaagactctgttatgtgttctctttatcagtcagtagttttgtgtttattggaaaggctgattagatcttggatttctatgttaatagttgatacataagctctaagacactgtagttagtgttcaggtaaaacttaaaattcaagaacgcctgacctgatgttctttgttgtgatttcaggtgaggagctagtagctctgagataatgaaagcatgtgacctatttgaatctgtagttacaagtagaagataaccacattttagtccaacaagttggtaagcttaatgcatttggcctaggagcattgctttgacactccagaggtgatttgagaacaggcagtatgggagccaggtgtgtgtaggtacatcttgtatcccagcacataggaggcagaggcaggcagatgtagtctacttagttccaggacagctagagctactgagaccccatctcaagtgggggctgaggaaaccacaaaagggggctggagagctggctctgcctttaaaggcgaggctctcaaccacagcagcagcaaaggcaaattggctacacctgttttagctggcccttcctttactgtagcatgtgaaagctgagctttttgaaggtacttgtacttagaataatggattaaaatttgcattttatttacgtacacatttgatctgttatcttaaagtcatcctcttgaactccctattttctgcttatcttgtgagatataagtagataaaaataaggaagtgagtgggctggacctgatatcatcaagctgtctttgttctttctcagcagtgtaagtttgaagctcacttttgatacttcacatttgtgcagtgactgcatacatttaaagtaatgtgatgaactggctttggcattacatacatacatggtttgccagccattattatgctgttaatagtatacgttttataaaatgctatcaggatctggggagtggtgatgcacacctttaatcctagtgcttgggaggccgaggcacatggatcgcagtgtgttccaggaccgccagagctactaggaggaacaaatgaaagaaacaaacaaacaagcccaaaacaaaacaaaaacccaaagcaacaacagaagaattagcataagaatgcaggcgttccttagctgctgctgatccattcctgactgtatgaagggacagctgacctcaaagtggggtcagtgcacagtaatgagctaaaattgtaaaaataaaacaaaaaataaaaacaaaaaataaagcagctgttcttcctacagaggaaggcagcattatgcagttgtctgtcagtcatttgttaatctcacaaggcttagagtgaggaactcggagtgacttgcagttcgtagtattctatttggatattagctaattcttcagttggggacatatcagaagccattgatgaagttttcaagattgagagcttgtctctacttttgttagaaggttctttgctttgacaatgactttagttaatttgtttcttaccctcatcccaatttcttcataagagcccatgtataagtcttactataactttaaatttaagggatgttaatcattgtccattttctattcagtaaaacacaagaagttgattggcatttaggcaaaacaaaagtagaagaaaatgaaggccttttattggaatggttttagttttgtacacggtaggtaggaaagtctgtactactgtcctctgattggctctaaacaagatccattctgctcttactaacacagaacttattgttttagtgatgtagaagatctttcccatgggtttattttaacatttaatacaaatctgacttgctaggaggtttatagagatttcttagcccttcctgcttgaccgacacagatcagcctcagtggagctgtccttgtggtaccagatgtagctcagttgctaactgctgacctagtacatacagagcctcagccatcctcagccatcctcctccatcttcagccagcgtcgagtaagtgggtgtgccagtactgtaatcccagtacttggaaggtagaaacaaaggacaggaaattcagggtcattcttgggtaggttttaggctcctcctcccccagtccctattaaagaaataacagaaacaaacagaatcttgtctttgaaacgttactgatgaaacaagcagaaataggtacatagtcatataaacagtttgcttataaaaatcaatatattcatacacatatatacctttgcttgcctgcttggagtaccaccatatctttaaaataaaagccatgtttatagagtactgagtttaaatatctacaaatacagatatagacctaactctttctaaccctgtacctggtacctagagtctctacgattgacaagtttgtgctgtatcccacctcacctgctcattcatcagtctgtcttcctttcttactttatcttcactgagttgcagacctgcgtggtttccatccccaagttctttacagtgtagtgtgtttagagctcagcatgcactgaagtgtactgtgccaggcttagcatagcaagctgggggtggtgatgtggagtagcattgcagccattgggaaactgaaagcgtgggatatctgttgcctgagaaattcaaggtaacctaggcaacatagtggaaacctgcctttaaaaacaagttttaagcatgctacttgtagaatttgacaggtgtctgcccctataagctgaaggcccttaagtacagaacagttctaccatcctggagagagcctcgtgctctcgagaagaatacactaatcctgaattgatttactctagactactgtgtgtgagagtagagcagcccaagacagtcagcgtccagcaggactctagccagacgcaatggtgcatgtctgtaatcctagctcgcaggagactgaggcatggaaattttgtgagttagagacctgtgctgtctatgtagtgagtgacagggcagccagggctacagagcaagaccctgttttaaaacccaacaaacagtcccctgcattccttagttattaaggagcactgactgagattgctggatgtttgttttcagtgtttatttttactgcctgacagtgtcacagtttctggtgtacggcggtccttcctcctccagtattctcttgttctttccccattcctgctgagccctttcttcccagcatccctctctcctctttctgtgtgtgcctgggtgtgacccactggttttcctgagttgtttgcatgagccttttcagacgcatgcgctaggcccactgtatttcagtcatacctgggtgagaatgttaaatgccgtgtttcccctttgtggaaatgctcttgcagcccttcctctcctgctactgtgcttgtgttctgtgtagtagagcctccatttctctcctagcatttgactacttcccatgtaccacgagggctcttgtgtccctccccaggctcagcctcacacagctgttgccagtccctgctcttacagtgagagtgatgtgtgctggcctgggctggaggtgggtatttcctcgctcacatcctcttgccaagctcttacacagaattcctgtgaactttcctcaccgctgtttctccatgtctaagagctgggctggaaagggtccgactctcaaataggtgacttttcttttcatttgtaataagataaggtcaagacatgtgtcttgttataattatatagccttgtttagttcgtttttggctttaacatgctttaataaatggaagactagttttcttgcattgagatttgaccagtttaactggatttttcctacagtggtgagggcttcaagcagtagtaaaaaaaatcaaaaatatttttgaaaattcaaattcatccattatttgctttgtgttgtgtgtcactggtgcaattatttaaagattataaaaatcaatgctagcctttaagctgatcattttttttaaaggttaaggatgccctgagaatctggatgatctagaagcccctccttgggaagtgagtgtgcacatcagattctagggtgtgttttcattatctgttcacctttgagacctcaaggagaaattcttgtctgaaggaattagttattaagagtaatggacattattaatactgggaaatattaaaaaaaattaaactcacggtgaaaagaaacaacatgttctgttgctaggagaatatttcccagtgctgtaatttgatttttctggcaccctaaagatcataagacctctttaattttacattgttgcagaatcttaaatttaaggttgagttccactttgtaatgatttgaaacagaatagttaatgcagattttaaacatttctttcctttaaagctttgtgtcttgtacaatgtgagtttgccaaattctcttcatctgctacagattaggtatgccattgctgctgccatgtggcggcgccccgtgcttcttaaacgcactgactggagctttgtcgcctcacttgttcacatgcacggagcctggtaacagccccatctgtattttgttagcttcattttcttatctttagatttcattataaactcaacatagcttttaaacgtaaaggccagtgttaatgagttaacgctactacaaaagtcactgctaaaacttttcatgttgaaacagattttaacttttcttaaaatgatttatgttttagttaagttatgtgtataagcgggactgtttctacctgctattttaactgtgtttgccaaattctaaatatacttttgaaaatggaagcttttatttatgttgcaaaagtaagcttcgggactgggctgtgtatttttattggcacgtaactattaaaatgagctctacgagaagctgtgcttaaacagcccaaggcatcagccgctgctgtaagtcacctgtgagcgctcggctgcttcagtcacgcacatggtagatgttgaactctgctctttgaacgctcgtggaggcataggtatgttctggatcgttgtatttagttttgcttgttgacagtttcctagagaatactcatagtattcttttttaagaataacatttttctcttcagaaatgctcattgtaaagaagttttaaaagaaagagaagaaaagtttaaaggaaagtcactagtctaccactacaataaatgagatgaacattttgttttggtttatttcaattcacctttgccctatatcctcttttcttagacatagtttaataaattgtaacacagtatattagctgatttcaatatccatttcgtaactttatcttttagactcctaattttgagtgctttgtctcagtccagggcttgccgtgagactttgtccgcagcttgtcactgccaatcttgtccggatgcccttgtgttgctcgctgaaatcctccagtgacgggtgcttgtcaagcagccatgggcttgcagcagccacagggattgcagtggtttattcttagtaacatttaaggacccttaccattcactgtaacaagatgcatccagttttgcaaactggaatatactttgatcattgctccttttcccaatacagtgtttagggtcaaccccaggcctggtgcctgctaggcctgctagaccacatctcagctcaggctgctcccagcccctggcctgccgtccttacacagttttagaatggaatccagttgctctctaaagagcttcacatttaccacagcagcccctggtcataagttcttaactataactatgctcatatacttctggagtaaatatccagatctctattaaggcagtaaaattaagacactgctttctttgagaaacgcccctgtaactgcagcacacggcttacaggacaggatgaccacgttgttgttacacagtctctcagcctgaccaacttgagatggactttcgcagcatggccactctgtgtccactgcagctggagttccatgggcacacacgtccttggtgtgcacagtgacgtacattagtttttaaaaaaaatcagtatcacttctgtgttttatcatagaatatattcagcttatatatttacatgtaatcccacggtaatgagcacttaaaaattaaaaatttctaagtcatagtaatcacttgtaaaaggtgggcagagttgtcttcacacacacacacacacacacacagagtgagggagagagagacagatacacacatacatttgaatgaaattttaatttaactcatgtaatgcccttgagacatggaaaacgcagttgtgaggttaaaccatacaagcttaagactttgacagcatcaaattgatcaccacgtttactgtcagaagcacagaattcatggtttcccactttctttcctacgttagataagcttgctagtgtagagtttgtcataggcgatgtcttgttcagataggctgttaacgattcacagttgtttctaattaaatatgagtttttaagttattgatgcccccatgtggtgaaaagcgtatctttcctctgttagaacttggaaatgactatattttcattttaataaaagtggataataatgtttttgaaatgctgttgatcagggacataatttgaattttgtaaagctcattgccataaaattcacagcctcaccctgtgttgtctcagaagtgcatgtaaccaagcacgcccattgagacaaagtataagagagactgagttatagatagcatagggcttttctgatcatgtttgtgatttcttatttgctttgtttctgtgtctcacataggtgacgtacagttcattgattatgagtattctggatacaactacctggcatatgatattggaaatcatttcaatgaatttgcaggtaagacccatgcttcactgttgcggtcatctgccaacactgacgctctagagccgttcaggaccaagtccctgggcaggagcagcatgtgccgcccagcacttgaccctctggctttgtttacttgttcctggagaagagagccttcccctcattgccaccagaaaatactgcactagaaggggagaatcttggagagtagtggtgtgtgacctgggttttgatcctgtgcagtcctttgctccatgtgcccatcacatgtatcttgcttccatctccagcacaacaaagccacatggttcttgaaatgctttttaacaagacactgacattttttatggttttgttttgattgctacagatgccatcttcatgctgcatccctcccttctgctccatgtgcatccaaatactacctaacatccaggtgtaaagaccgtaacagctccctccttcatagcgagagcagcatgcgtgtatgaagggtgaactcttagcctacacaacctcattgctgcctatgagttaacgccagtttaaatttgattgctattaaaaagctgagcatttttacctcttgaatttcattttataattacttctaaaacttgagatttttaaaatgtaagtggaatatataattaacactatatttaggatattttttttttttttgagtcagggtttctctgtgtagccctggctgtcctggaactcactctgtagaccaggctggcctcgaactcagaaatccgcctgcctctgcctcccaagtgctgggattaaagcgtgtgccactactgtccagcttaggattttcttaaaagtaaagatcagaaaataatttgggtgttttattcctagtgaggatatggcatcactgaacttagacttgtagcagattcctgtctttttatatttatataatttgggtctaggctaataaatgaagttggtggaagttttgattctagttacttagttctatcaaatttaccacacatatatgatacatatgcgcacaccacagcccatgcgtgtgctgcacatgttctcatgtgctcactcgccaggaggcaggaatgagtctgtgtagaataagagttcacccttttggtttttttttttgtttgtttgttttttgttttttgttttttattttttgttttttgttttagagacagggtttctctgtgtagccctggctgtcctggaactcactctgtagaccaggctggtctcgaacttagaaatccgcctgcctctgcctcccaagtgcggggattgaaggtgtgcgtcaccacgcccggcgagttcacccttgtgtcatccacagtggtcttagaccttctgtgggaaaagctgaattaagccctgactgttggaatacaagggaggaagggagcattaaggtgagattgctgtctctaagacagaactctctgggaggagaagcaaaagctgtaacacgacagagccgggtttagaatatttatgaagaaccccaagcgccaggcaagagcagcagaaacattgagggttggtcatcagactgtggtcacggcccacctttcttctttcttcttcatcaccccttcctttggaaaagatggaagtagaaaatggcagagttggggtatatgggcatgcagctggacatggtgtttgttttcctttgtggggtggacctaggaggactggacatggagagtattgtggtgcactgtgtgaaactgccaaataatcaataaagatgtgtttatcctgtgtgttatcaaacgctgttaggacgaggtgcttttggctctgctctccctttactgcttaaaatacccagaggcccttactccatggtagcccggggcgcctgctgaggactgctcagtgggagcagtgacgtcatccgcttcctaagatgagcagcagctctgtgccttgcttagagttacgctaggtcagagtgcaggtccattgtgtgatggaaggtatggccagcaggagtgagaggctgcacggcttctctctgggaaacttggtggcagtgcataagcacgtgaagggcgtttctcagtcgtctgtgtctcctcaggtgtcagcgatgtagactatagtctctatccagatcgagagctccagggccagtggctgcgctcttaccttgaagcttacaaggagtataagggctttggcagtgatgtcactgagaaggaagtcgagactctcttcattcaagtcaatcagtttgcgttggtgagtaaagtcagcgaaacgttctgagtgttggtaaccaggtgctcatcacctggcaaaacaagttttagtttgtaaattttgttgaaaatagtgaaaagtgtggttgcttgcagtctgcctcattaatttcctggttttaaggacacactctgttgttgctttacccacttgtctatctgtgcctgagttcactttgaaaatactgagttatcttctgagaatattgtcgttcattagcacagcttacagctgatgtgctaagacattcctgagtattaggacggttctttcagctactttataaatttcaagtatgattttatgaaattggctttgggagcattggccatcttttcagagagcctacagtgatggcccacaactagactgttgatgctcttaggttcaggcactgattctccagagaccctggcagcgcagtgcacgtgagtggctgtgtcgatgtgacagctgctgtctcatgtcgcatggtcgagctgctgggcacagtactcacttccagaaagaagtggacttaacagacttcatgcagcgttcacatgctgtagattctaggattgtatctgaacacagcccattaaccagatgctaggtgctcacggctgctctagctgaggaatactggaagtaaagttcttcagaatgcttataaattagaatgaccaggtgattttttttttttggtaaaagttaacacccatctttacaatttttagtgaagtataattacgaataaacttaaatatgacttaaggggaaaacctcaaggtggtccaggcttccagtaccagctcttgggaagcagacacagatctatctagatcttaacaccagtctggccacacagcaaggaaaaccagcctggactatatgagaccttatttccaacaagtaaaccaagcttcctgcaaacaagcatcctgacctcggtgtatgacttgggcccatagccttgtcatagccttgtcatagccttgtgtgccaggcctcggggctgcggttgcaggtgtccttggccatgctggctctcgcagacagtcacacgtgtcacttttatgaggacagcagagatgtcagcaagcacgctcacttgtaaccatgaagacctgtgtttagccccccagcatctacctacaagtgggcatgacagacctgtccttccagtcctatctgagtggccttctgaccagccagccagttcagtcggtcagatagctcctgtctcaagaaatggctcagcaggtaaagtgctagctgtgtaaacagtaggcccggagtttgggtccacagtgcccagtgtaaagagctaggtaggtatgatagccctcctctaatctaagttcagtgcagggattcccagaacagcctgactagctaggctagctcagctctgggtcaagagagagaccctgcctccgtgtacaaggtggagagagaacaaggaagacgccttttcatacacatgcatctctgatgcatatccctacacacaggcattcacatagacacacatgcaaaactatagggtggaacgtgatagtgtgtccatgtgcacacaggtgcatacggccccacatcattacgcactctgatagaaaaagataaagggcatcaaagtaaacagtgctctgtgtgtgtgtgtgtgtgtgtgtgtgtgtgtgtgtgtgtgtgtgtaccacatgtgggattctgagaacaacttggaggtgtgagtgttctcaccaccatgtgaggatcaggcattgaacctgtgtccttaggcttcatggcaaaacgtttattcactgagccatctcactggctgaagaaccaactgttctattaatattacccctttagcattttctttacgtttatgtgcagttttctagtatatagtatgttcactatattctgaggtctgataccaacttctggttgttcataaataaaactagttagttgttgaatctctcttctcttttcacagttctactgatctcttacgtgacgtctgtccatttcagttctggaaatgtcttgttgcattgctttctgtttgcagaatacagagcgtgtggtaggatttttacacaggtgtgcacaggcgtgtgcaggtgcaagctccaattccctttaagaccctctgctagctgctgtttaactagtttgctctccgtaaagcaactctggtttcctcttgtggagcactgaggtgtttgagtggatgagtaactcctccactcttttcccattaaggtctttgtccggcttttttgtcaaggctacacttcctaatagtgccattccccgtgggacacacagttaaacacatgagtctatgggagccaagcctattcaaatcaccacagtggccaaacccaagaataaggctgaccttcagagtaaggctagaaacaaccctcttaagatttttaaatgtattttgaagtactgtacttaaagttagtaatccacctgtagaatatataagattttttttttttcctaagggtgagggaagtagaaatccacaccaatgcttcatttggggctggtaggactctctcctctccctctctcctctcccctctcccctctccccnnnnnnnnnnnnnnnnnnnnnnnnnnnnnnnnnnnnntgattaacatcccttaaatttaaagttatagtaagagttagactcccctcccccctccctctcctaactctacaactcagactgtcctagaacttgcccaggctcagttggaatttgtaataatcctcttgcctcaacctcttaagttttaatttgaatttaaactttaatctatttttagtttagatttatttattttatgtgtatttgcattttgcctgtatatatacatgtttgctatgtccgccacaagatgacatcagaacacctggaactatatagataaagatatagattttaagctaatatgtgggtgcttggaacctaacttgtcctttgcaagaacaacaaatagttttgtttatttgtttttttgttttgtttttctaggcagagtttctctgtagctctggctatcatggacttaactctgtagacccgacttgccttaaactcacagagatctgcccagccataacaaattttcttaacaccaaaccattctcccagccccaattaagaagaaattattatcgtgtagggttccataaggccatccatgtgcgtctacagtgtcactggagcatgccccaccccatgctcatctccctttctccaccatcctcccatcagcccctttgttctgtaacagtgttgctctttatccgtttatacctagaagtctaggacatgacaaatgagagaaacacagtatttgcctttgtgaggttggcttaacacacttaacatgacagatgtcatcctttatgactgcagaaattccattgatgcattatttgtccctgcctctcattggatagctaggctggctcgtaacctgatggctgtgtagtgcagcagtcagcaggaaatgtccttgttatatagaacatggcatatatggtaaatatcgaagtagtgtgcatagctaggtatacagtagatctgtttataactttctaagaagtctctctccgtgttgatttccatacctgctgggtaatttacagtccaattagtaatacagaagggatttaatccgacttcatgctctcagcatttacggacatttgtctttttgataattgcattctgatactagtgagaatctctaatgtgtttatttgcacttctctatggctgttgatgtccacaagcactgaaatttgaggagagatctccatagacattacagcatgccttgctaacaccacacactgaaacaatgtttacacgcatttattgattttgtgtaggtgtgagcatgctcatgccacaggatgggtggggtcagaggatgacctaggggggatcctttctcttcttctgccatgtggactctggagacttaaagcttgccgggcttgactggtggaggccacttcacttaccctctgagccgtctcctggcgcttctgttgcctttgccttggaggatataacagagggggaaaatgtttttaacattcatttttttctagagcatctctagtaaagtctagtagagccttttctggggaagtggaattttgattttgttgccagcattaaaaataccatgtatgtgaaagttctgcctgaatgtatgcgtgcataccatttgtatgcctggtgcccacagaggcaggtagaagtcatcggatcccctgggactagagttacagatggctgtaagctactgtgggtgccatgtaggtactgggaatcctgtctgagtcctctggaagagcagcccccatgttaccagaattttttaaaaaaatacttaaaatttttgatttatcattagtatgtgtatgtacacgcacatgtgtaccagaagtcatggcaacttttttttttttttaaagatttatttatttatttatttattatatgtaagttgacttcagacactccagaagagggcgtcagatcttgttacagatggttgtgagccaccatgtggttgctgggatttgaactccagaccttcggaagagcagtcgggtgctcttacccactgagccatctcaccagcccccatcacgacaacttttgagagtaggttcttccttccagtgcctggggtcgaactcagagctcttttccttgttgaactatcttgctgttgacctgtgttagctgaattttaaaataatgtgtctaagtgaaaattaattgtgggccagtgaaatggcctaatggccagagtaaaattctggaaatttgtgtggtcgaaggagaaaatgagtcctctttcttccacatatgctcgctctctctctctctctctctctttctctctctctctctctctctctctaaatgtaaaaacaagggggtggggggagtctggagagatgaattgggtcctagccccgagcatggtggcacacagcaatctacaactcctattccgggtgatataaaacacttttctgggcactgggcatgcacctagtgcacatagatacatggaagcaatcaaacttgtaaaataaatcacattaattttaagttctaggatgcagttttcacggatacacttgttcggcactgttgtaattagtgtgtatgatgagccattacaataggtggagggtgtgacctaattcttgtgtctgtgtgttatgtggaatactgaatctgctttggacaaaggttacagaaactactagacttcagtttccaagttgttttaactttgtcacttgtcagtagggacagagtcatcagtgttgaccctgtaattacttgtatgctttaatgtggccatgttgtgtaaaaattaacagaaggaaaaagatattttgaaggctagaaagtagagaaaaaaggaagtaccctacatgtatagaaataacaatttttgtatcatgtaccaagtatgtttccatacttattgctctttcttctcttgaaggcttctcatttcttttggggactctgggctttgatacaagctaagtactccacgatcgagttcgacttccttgggtaagacgatgctaactgaggttctttttccacgaggttgagctagtgtagacaggacagggagccccgtgtctgtttgcagcattgtgaaagccacatgcacttacatgctcagcacggggcgtgtccagcaggggcagcagcagcaggtgaagcatgcacactggcagtgtggcctctgtgcagtcagctcagggcagctctgactctgccttgttctttccccactaggtatgcggttgtccgttttaaccagtactttaaaatgaagcctgaggtcacagcactaaaaatgcccgagtaaagaagaggcctcgctgttctccaggagccgagcgacgcttgtggatgtttctgagaaattccaaaagccaatatttgttaaaactcatttaatttggttatcttgctttaaggattatgcctctaaacaaccaacctatttttaaatagaatgatgttgagatatgcttactgctgtcagtgtgtggcgggctaaagagttgaccatcagcagggagagtgaggagtggggctttagcctgtggcagtacagccatgttacatgtgaattatttattacagatttgacatgactgactactttgatctttcatttgttggttcagtgtatgcaatgagaatattgtggaaatctttaaaaggttttgttgatagatttaatttcagaaaaacattcttgttgttcaatgtaacctttgtaaaatgaatcatttactctcaaccttggcagtcactgcctcagtagtaacttagggtattctagagaagggcccattgaggggggagtaagggagttactgtctcctggggtatacttttttgaattggaaattggaaatcatttcttttgggggagtacaacttagaattaaattgtctctacatagcctgacaatataaaatatatttactgtataagcctggaatataacaatttaatgttaaaatctgttattaagtcatgttttcaaatactagatacagtcatttaaggtcatagtcccaagttttagaatttacctatcaaattgtttctaaccaaaagttttgttttacttaagatactctgtttttgttcattaagtaatagctggtattgttagtatttgaaacaaacatacagagttcatcatacttggaagcaaggaatatcatttagatgctttttattcagatccattccttaagttggttttgtgtctgtagagtcagcaaatgattaattatacatgtgattccagagtagtgttgttgaagcagttacagaatcagtaaggaacatttagctaggtcattgagcttgactacttacaatctaacaaataaggaaatgtgaattagacagtagttgtggtaggaggacttgttttgatttatcttggttttgtcagtctagtttttattttgtggatgtgtagggggaggcaactatttcatgaaagaaagttaggtctttgaggtagacaagaaggctttaatctttgaagactgctctgtgggttgagcagtcaggggtaactttacttagattagtcagacaggctttgcactttggtcacataagtgcttatgtacaaagttggctccatggatctgcatatttaaagtatgcactacagatctatcctaagattgtctggtgttccacatgacttatgttctcagccaagtgctttcaaatacttggattgtctcaaggtgttcaaacctaataaagtagaaacatgccatttgaaatggtaaattctagccacatatatacactcttaaatatgtgtctctaacagtgttagacctggcttcggtttctacctccccagtgctgtcatgttcatgtttgtttttatgaaccacgttacttactgtaagatcattacaattttgctgacttccttgaatggaaacaaataatgacaagctcgttacaacgttcaagcaaacctgaaaaaagaaaaaacaactggcttagtggaattttcattcatggttgaaacattgtcgtaggatgataaaaatgtgagcctcctgattcttttctttcctccttaaaatccgagagtgtgtgtcatgtggaaaccctggagaagacagtgttgctagtctgttcctgttcgtgagaatgctttgaatggaggctcactgtgctgcggcggctgcggctgctgccggtgctgctggactgcaaagcagccagcggaaatgtgacaggctcctgtggcgtgagtgcaatgacagcgaggcgtccttgttcaccctgctagcacgtaagagatcgtggagagagaccagcacacgggaactcttgcccccattccttggccagatttgggtgctctgatgcacccgcttctcatacagcttttggggatcatggtgtagactatcaagaggattcaaaatgtctttctttgtattgaccatgtaagggattctaaagagggtatattgggactgttctgaagagcatccctctaaaatgtgtcctgtggcttgctagatatcagttgccttcttttgttcagctaaggaacttgaatgccttacctaatcactcaactggtagtaagctcgttttgtaaatgtgaaagtggatgttagaagtggcattcatggatgttcaatgtaatcaatagaccgtagtggcctggatgctttcacaagcaaaattccccatttctgccctccacccccatcctgtttccctggcacactgtatgaccttcaacctgaccagtgatatttgatagccttcctctccctctgtgctaccaccatttctggaaatgagatgtggtggccccgtcttgctgttggcatgatctgcctgagatgaacatgagcacaaccctcatcaactaggtctgcttggagtgtaaataggacggtgtaaataagctgctgcaattagtgtgagtgttgtcttgcctaaagagtgtgtagttctgcattttcctttgtagaagtttttctgtcactaaatgatccagcctgttgtcattaggctgggaaccgagcagtaagatagcaggaactggaaggaaggtttaatggtttagttaacgttggcatttatttatttagcctctcagtgcctaatacgacttttctccattttttacttggctattaattttttttgtaggttagattctgggaagcagtatatttatagagctcatctttgagtcacaatttgaaactaaaggaaactaaaaatataatttgtttgtaaactgaagtgtggtccccttttctattttcagagtttgttgacactttctacaaaaacttgaaattcaatgtgaatgtaaatctcatccatacgagacacagggcaaatgacgtctctcacgtttgtcaggcctctcctctggagtggctcagtgtgggccaactagttttctctccctgacccccaaatgtttattttaactttgtgttgctaacaaaaaagaattcccgcaaacactcgaaagaaaagttagaatatttgaaaagtactcagttgtctcagttgtccgcagagcccgtgtctcctggtgacctcactgactgacttacagagggcagtaggatcaggtgggactttacttttttctctctaacttgcttttaagcattttatcctgcattccagagtactgtagacttaagtattccctgttaacgtgtcacctgtcaccatgctttgtcctggggttgtcctcgtggcagcagcttctgctacctcacagggaaggtgtgtgcaggtggagagcctcctgacaggtctctggcttcaactgctgctgattttcctctgtcagattgtaggctggcctttactgtgaagctgagctgcatcctctggcccgttcctgttctgagtaggtggtgagccgcctttccccacagtgacagcagtgttcagtcttgggtttgacaaatgctatcagctgctccagacaaaacatccccatttctggaatttcagtccatgtttctgtaaacgaaaatactgaaggctttgcattactttgaattcttgaaggctaaattcagtgacacgttacagaatgagttagattggttttagcagtttttaatgctgaaaattttcacttttggctcagtttgatacgggaagaaaccccaaagtatttggattagaaacaagtcgtgatgcttgatcgataagcactttaactcctgtgttggctgacgcttctttctctcctggactgtagactatggcaccaccaacctatctttgtccattgtgcattgtatggcgtatgcacttgcaaaaatactctttaaaatagttataattttatcttttggttgtcttacccatggtggtcctttagatcctgtcaagtaagttttaataaaacactaggtagttatagaaaactgagaacaccacattgtcttttgattagtttgcgaaggtggagcaggaaagcctatccgattggaattgcaggcttcctagctgcaaactcttgagagctaggttgaaacccaatgacacctgcagagcggtggagggcggggagtgcctgttgtccacccctgcactgtggcgtgctgctgtttgttgtaggtagcgacgtactgagtgttccttgttagtaatctggagtcgtcctctgtatttacatgtactaaagtaactgtaaactaatggaacttgtaagaactttcctgtatttaggagcttttgtacagcaaggtcacatgtcctgattgaaagaagaagacatgctattacctatcatatgcaagggaaaaagctgaagtgaggagttgtctttgcattagctgtctgttgaattggggagctatggcacaggatcttaaatttgtgtttctcaaatgtgaattgtagtctaatgctgctttgtatagactaagtgctatggctagtctcagcactgaccgtggagtgatacctcgcagtgagcgcagcctttgttctagcttccccgactccgcagcactgtctgcgtgctggacagcttgcttatctgtctgctagcagagatacttcctgctttttcctttgttgttacatatttttatgtttgaaatttaatttttactactgttaatttaagtaaaatttgttccatgtataaattggcattgccagtgaaaatcaacagcctcattcatgacgctgctgaagtgaagtacatttgtgttctgtgttcatgaacttgcaatgaagccgtgtttcttttacgataaagtgcggcttaggctttatttctgtttaataaggctttctaccattgattaaatgaaggaatgtatctttttgaagagatttatattctgtaaataaacattggttgtaacaataaagttgagttctaactataatgtgtccatgtggttcatactcaattaagactctctcttgtagaatgaatatatggaagtacatgacttgaaagggttggagctgagttgtagaacatttgcctagcaagggcagtcagtgtcttaggtttgatccctaaaacaagagaagaaacaaaagtttcccagagttagtaatgagggctggagatccttcttcttaggagaggagttacccagtagtcatgacgactgaaaattgtatcccaacatccacatagcaagctctccactcacctctaacctcagctccaggggcatggggcacaaatgatcattgaggcttgctggctcccaacctaaccaagaaaatatgagcccaggttgaagcatgctaggactcaaaagagatccgcctgcctctgcttcctgagtgctaggattaaagacatcctctaccctattaggctgattgcatttcagccacatagaaaaagaggacaggaaatggggtaaggctatacatttccaaagtccacttggtgacgtaacatacttccagcaagggttctaaggactctgcaccctttccacatagcccccagctgggtcaaggaacacagctcattcagactgccacattcattctggttttgcattgtgctgtgaaaacatttgaaaatctgtattctgccaactgagccacacctcccaggctctagaggttcgcttcttgtgcttctcatcccccctatcaggctaactcttcccaaactctaggagatttctccttgagaaagtctgcttggctaattgtgcatctgtggcctttcccatacctcactgcactgccccacagacacttcttgtcagcattcttaactcctccttccagtcctttgctctagggatctgtctcaaggtgaacactattcctctagtctcacaacgttgtagtgtactatgggtacatgatgaactctcatttcccacacgaaagtcaaaaagtagagaaacattttccaagaaaacactaggcgggcggtggtggcgcatgcctttaatcccagcacttgggaggcagaggcaggcggatttctgagttcgaggccagcctggtctaccaagtgagttccaggacagtcagggctacacagagaaaccctgtctccaaaaacaaaaacaaaaacaaaaaaccaagatttattaaagaagaagaagaggaggaagaaaacaacactaggaaggtaggatttgttatttcaggaaaggtatacctctgggcaaaaatgttgaggttatcttgtctgagtccgtgtgttgcttacaaggagaaaacctaaagttgaaatgaattgaagtctaccatgtactttccctccatcttgatttgctttggtgttgtttaagccgcaattgagagacggaaatataatttgttaacattacctgctcagaggtgaccagaattcagtatccttagattctggtatcccgacatttctgaagtcctactagctgtgcgtgtgcatgtgcgtgtgtgagatgtatgtaggttgtatgtaccgctatatcagcatgggggtcagaagacagttgtgtagagtcagttctttacatagtgtaatattttggtgagaatgcagccccttcagaggtttgaataattggtccttgtggcattgtttaggagctgtgtatggccttgctggaaggtgggctttgttgtagaagaagcacagaattctcagctcctcagattcctgcttcagaagccaggccttctttcccactggcaccatacacccaaataaattctcttccagccgttgtctggtattggtgcttcatcgcagcaaggaactgtgcacatggtttacagctattaagtccaagttactagacgtactcagtgctgaacctgctgcgctgacctacccagatctgacatggtctcaatgtagccctggctgtcctagaggtctttatatagacctagcatccaactcacagagatcccactgtctctgcctcccaaacactgggatcagaaatgtgtgccaccgtgcctggttcacaccatgcttggttagtttttaaaaggtgtgtctatagcagtgagagaagcagcagatgaccttttctaccctctcttgagaggagttgcagctaaaatctgcaattggttttcttgtaatattttatagaactcatgaaaacccaaagcagatatcactgacttacactagaacccatttgcgaaagagaatggtagctgttggtaacgacttgtgtaggcaagaatctttttccccaaagacttggcacttgcacccgagtatcacctttgatacaacctgtatcttgttacttctattgccatgataaagtaccctggcaaaggcaacaaagacagggtgtattttggctcacagttggagagtacagttcatgccaatggtagccgctgagacgcctggtcatctggcaactatagtcaaggagcagagacacatgcttgtgatccgctcttttcctttttgtacccaggattccatcctagggaatggtgccgcccatggtgactgggtcttgccaacttaatctaatcaagataattccccatagataacacccagaggtgattctagatctcacaaagttgacagttgaggctaacagcgtacaattgcttttgatacaatgggtatttttcttgaataatataaattctgcataagacttatgaatcagtatcacacacccatctctactaagatctctctagttggttttcacaactatttgtactgtgaatcttaatagctgaaaaattaattctttttacaaaaacactatatttagtagttagttgatgaatactatttcaatcttcacaccacacagaagatgttaattcaaactgctctctttccctcattttgtaacactaaacatttaaaatgttattgtgctccttgcatatttcttcttgcatggtggcagaaggctgtgtaggtgccttgaaaaaggctgtcttgctgatgtccctaacaaaagctaaaaactatcctattcaaagatttatgagtttcgactttgaaatctgacagaactgaacaagaaggaaaatgctaagttcttgactgtgtttgctggtgcccacttccttatcagagcagaatcctgttgtcttcagttgttccaagtgttgacagcactgttccgtttatcttttggaataaaaatgaaacattaggacagggtgttgggcaaatctccaaagtctgaagacatcatatggccatctgtctacacatccgggttgatccagctctggccgtattctccctcctacctcactaaagactcttttaagacgtcccaactggagacctctgtacttctgttttcttcctgtgacctccagtaggaaccctggactcccatgtcaccttgggctctcctgccagcatctgtaacaagtgacctctcatcagtgtttctcttaccaccatctaggaaacagatttggatgtccatctgtccactcctgtgatggcagctgacctgctaatgacatgttttttccttcctccctccctccctccctcccttttccttttttccttttcccttccccttccgcttcctcctcccccttccccttcccttttcttcccttccctttccttctttcttttcctttttcttcgactttgactgtcctggaactctctatgtagaccaggctaggctggcctcaaactcacagaaatctatctgcctctgccttccaagtgctgggattattaaaagcttacaccaccaagattggctgttatttattggagcagtgctgggggtcaaatccagaactatgtacatgctaagcaaatgctccaccatcaagctttatctccagcccaactcattcttctttcactccatccttttgtaaccccttatttctcatgagcaaccattttatagtgttttataatatgcaaaaacaaaaaggccttatgcatgaaacgtatgtacttacagatgagtagccagggaatatgggtatttattctccccctcaaagatttatgtgtgtggtggtttaagaatggcccccatagactatgtatttgaaggcttagtcattagggagtggccctgcttgagaaggattcggaggtgtggcttttgttgcagtaggtgtggccagtcttttgcagctctatactaaaaggagtcattgggcaaggaaaaatacaacatgtgtggcttgaggaggaaaaaaggagggccaggaagagcagagtcctgtgctctaggagataaaacacttaaagaaaagcctggcgctaaatgggatgaaagggagcagtgacctcggggaaacccccatcagcgccacttccagctcagagaagctcagggagggagggaaaccatggaaacagaaagctgttgaggatgcatttgaacgagggagccatgttccagccccagcaagcagaacttggtggcttcagccatgtggttctgggctttagagtcagggacacgagaaagggattgtgggatctccctctgtgactaaggaaaccactgagtccaggcatggctctggtaagccctccacgccctctgccttgctaaaccatagttttcattcctaaggcttagccaccaagttctgttcccttatttggccacttccttcccccgaggatgactactaaggtccagcagtcaaaaccccacttttggctcacccaattcacttgtctaatcagaattaagcacctcatcctatcacagggtttccccttttaccttttttttgttttttgttttttttttttttgtttttcgagacagggtttctctgtatagccctggctgtcctggaactcactctgtacaccaggctggcctcgaactcagaaatctgcctgcctctgcctcctgagtgctgggattaaaggcgtgcgccactgtgcccggctcccttttacctttgtaaactgccatttgcttatggcccatgtctgtctcctctatccaaaggcagtcctaatttggacagattcccttattgcccgctctcccttgtacccttcccattcttcctagctcatgatgtcctgtctttgtctcttgttccttgccttttgtctctcgtctctctggggtaattttttttttttttttttttttttttttttttttttttttttttttttttttgggnnnnnnnnnnnnnnnnnnnnaacttgtccttgggatatcttgtgccaaatgccagttctttcagtgtcccttcatggaggctcagagaggccattgcatgcatgaagctgggaaggataaggaagccaggattgtattagagacttcaatatgttgcagttatgggatagatgctgaggagagcttgtaagagggtgtggaagcaccccaagagagagaagtgtgttgtggtcaagaaaatggaaaggggctgcaaaccaaagtgcctctccataagacatgggaatgtagtttagagtttgctctgctggttttagctcttgctgtggtccagtatttcttcccttttagaatggtcacatatatcctgtaccactgtatgttggaagtatgtggtttgtccaccccccaactcaccagacacaatgtttcattttatagctttggctgccctggaacgagctctgtagaccaggctggcctcagagttacagagatctgcttctgcctcccaagtgctggaattaaaggtgtgcatcaccactgcccagtgtggtctgctttttgaagttgattttataggggtttacaggtaagagatttctgtgagtttcagaagcggctttggatttttaaatagtgttgagactgattgactatggagacttctgaagttggactaaatgcatttttgcattataatgaaaaaatgaaacataaaaacattaaaaactaggcctttaggcccaggcttaagaatgtgacctttgtgactcaatgctccaagtcatgctaaccacaaaacagatagcaacattcctccacccacccgattcctgggtttggggagtgttagttcaaagaaagtcaccctgacccatcctgaccgttgctggaacccactatgcaaatgtgctattgttagatactcttagaaactgtcttgacttccacttcctagtgactcttaactggtatttttggtattttccaacaacaccctccccacccccttgagttgtggtttcttcctttaaataaccccttacccagctactcggggcgccaaggtcctctacccctgcgtgatgtacaacagtgggtcccagagcgctcttagaataaaagtcctcttgcagtttgcatcaagactgtttctcatgagtgatttggggtgtcgcctctcctgaatcagaatgtgggggagacctcacattgtggttctttcaataatatgactataagcctaagggagacaggaatgtggtgttttgaataagactggcctccatctactcacacatttgaatgcttggtcattagggagtggctctattaggaggtatggccttggagtaggtgtggccttgttggaggatgtgtgtcactgggtatgtgtgctttgaggtttcaaaagcccgagctaggatcagtgtctctttcttccttctgcctacatatctgaatgtagaaccctcaactactttctcaacaacatgtctgcctgtgtgctgtcatgttccccaccatgatgataatggactaaatgtctgaaactgtgagcgagcacctaattaagtgctttctcttataagggttgccttggtcacagtctctcttctcagcaaaagaacactgacaacaacaatgtgtataggtgtttgcctaccggccctgcctatgcatcacatatatatcacatgcatgcagtgcccctagaggccagaagaggatgttggctcctctagaattggagttatagatgttcctgagccaccatgtaggtgctgggatcacacccaggtcctctgcaatggcaacatgtgctttttaacaactgagctctctccgcccccttgctctcctttttagttagcttaacattatttttattcttttcattctctccccttttttatttttcatttttctaagcatgatattttttgtttgtttgttttgtgagacagggtttctctgtgtagccctggctgtcctggaactcactttgtagtccaggctggtctcgaactcagaaatctgcctgcctctgcctcccgcgagttctgggattaaaggtgtgcaccaccacgcttggctttctaagcatgatattttaaagattggggtttatctaatactatatatgtagctcagttggcagaatgcctgtctagcatgtaccaagccgtggatttagttcctaacactgaatatattggatactgtggcacatgtctctaatcctagcacctctcatgtggagccaggaggataataacaaacttgagtttgttgagccaggacttcaaggttgggctgtaagatggtctagcaggtgaaggtgcttgctgctaagcctgaggatgtgggtgcaatccctggaacccgcatggtagaaggagagaactggcctccacagttgccctttgacggacacatgcgcatcatggcatgtgtcccctcccccctctacgctgaataaataattaaaagtagaaatgaaataaggcctttattcttgatgaccccgtgagtgcctgaggtacccaagatcctgtatcagattattaattaaactagaaaggaaatgagaacccagtcaagagcgtgtgttcggaaacgcacgggcttattgccaggaagacctcccaggctctgctttcctggcaaggggccagggaaggtggcgaactggccccctgctggcgtgcccgcccttaccccagccccctgagagtctttctgcttagggatgttcctggtacccaaccagtagaaatgtttgctgcgatctaagcttatgtaaacggcaggaagtgccaacaggaggggacatggattccctgtgctttttgcatggatggccttcagaattctccaggttactgcggtcaggggccccgggtgacacaggttacgtgaatagtctcacccaggataaatacagatagcacctttccctcctgcctctcctctcctaatttccagtcacagacattgacctcaaatacacgtcgatctgagaactcgacgctcaggcacttaggaccgactggtttaacctttgtagagctccacaggcctttctgttaagaggctgtgcttttaaaacctaggtcagcttcttgaattctcttttatggcctctaggacccagcctcctttcttaatatttatatttctcctttattaaagacaatacctgttcactatagaaaactaagagtatagagaaatcgaaggtgaaattgttgccctatgtaaatgtcatacatgtgcttttcaagttttcactgcacaagcatctgtgtattagtgtgtgtctgtgtattagtgtgtgtctgtgtattggcgatagtgaatagaaataaactaaaaaactagaaatggaccacagttattccatgttagcattttttcttttagtttttttaaaattaaatttgtatgtgaatgagtatgtgtgtttactattatgtgtgcgtttttgagagtgtgtttgtgcccttcccccaggcttgagcagggtaaacagaccttaatctgtttgtcttccttaaccacagtctgtctttccccctacctagcccacctagggtggagtcttctgacctaggtggaagtttcttgttggagcagactgcccgctgagcttgctttacaaccttgtccagccgaaacaaagcaatataatccagtcgaaacaaaggatgggtctttgggtttcccccatataaacgcagagctgaaaattaaactttgagccttgatcagaaaaccctttatcttggcctcattatcctctcacctgcccaccctttgtcattcccagcctccctcccaggtgtacccagttctccgtggctgctggccacgtgtgttcatccatggaagccagaggctcggaacgctccaggcgctgatcatgagctgcctgctcgggatactgggaacagaacttggttcctctgcgacggtattatatcctcatcactgagccatctctccagcccctactttttcctttttaaaaggataactttcaagcccggtgtggtggcgcacacctttaatcccagcacgcgggaggcagaggcaggcggatttctgagttcgaggccagcctggtctacaaagtgagttccaggacagccaggactatatacagggaaatcctgtctcgaaaaaagccaataaataaataacaaacaagataactttcagtcttcttttttcttccatttcttccctgccttccttcctcccctcccctttccccttctttctccagagtgctcagatgcgaaggttttgcacaccctaagtaggtgatctcggccacagagccctgggagttcccacctttgacttccctggtgggtagctgcttaagttctgctctggatcaccccatctcatggtgcttactctggacatcttaggtgcttagtccaagccatgtcaccacgactgtgacacacagcctcccatctaaacctctgtgcacatggccattttcagttttgctcctaatgtgcacaatttgatgaacttcttgagtcatcgtctcaggtctcacattgaggccaccgtcaagcttgctatgtagctgaggacgaattcaaactcttgctcttgctgcctccattctctgccactgctgggattaagggagcgcacggtcacatctggttaacactggttaattgtcattaaaggtatttctttgtcagagatggcattttgttttcttcttgaaagtc

SEQ ID NO: 484 - DNA, 6412 bp, Mus musculus
cgcggtctagcgcactgaggcatcttcccgagagcggccgtgcctccgcgtctctgcactgcgcaccccgtccggccgcccggttgcccccgccgcccgcccgtgcgtccgagcggccgcagccctccgccgagggcgccccgggacggaagggtccagcagcctgccggcgcccgccgcgctcgtggtcgccgtcgccgtggtcgtcgtggtcgtgtccgccgtcgcctgggccatggccaattacatccacgtcccgcccggctcgcccgaggtgccgaagctcgacgtgacggtgcaggaccaggaggagcagcgctgccgcgacggcgccctgagcctgctgcggcacctgcggccgcactgggacccccgggaggtgaccctgcagctgttcacagatgggatcacaaacaagctcatcgcctgctatgtgggtgacaccatggaagatgtagttctggtgaggatttacggcaacaagactgaactgttagtcgaccgagacgaggaagtgaaaagtttccgcgtgctgcaggctcacggctgtgcacctcagctctactgcacctttaataacggactgtgctatgagtttatccagggcgaagctttggacccgcagcatgtctgcaacccagccattttcaggctaatagctcgtcagcttgctaaaatccatgctattcatgcgcacaatggctggatccccaaatctaacctatggctaaagatgggaaaatatttctctctcattcccaccggatttgctgatgaaaacattaataaaaggttcctgagtgagatcccaagcccgcagcttctgcaggaggagatgacttggatgaaagagctgctttcaagcctgggctcacctgtggtcctttgccataacgacctgttgtgtaagaatataatctacaacgagaaacaaggtgacgtacagttcattgattatgagtattctggatacaactacctggcatatgatattggaaatcatttcaatgaatttgcaggtgtcagcgatgtagactatagtctctatccagatcgagagctccagggccagtggctgcgctcttaccttgaagcttacaaggagtataagggctttggcagtgatgtcactgagaaggaagtcgagactctcttcattcaagtcaatcagtttgcgttggcttctcatttcttttggggactctgggctttgatacaagctaagtactccacgatcgagttcgacttccttgggtatgcggttgtccgttttaaccagtactttaaaatgaagcctgaggtcacagcactaaaaatgcccgagtaaagaagaggcctcgctgttctccaggagccgagcgacgcttgtggatgtttctgagaaattccaaaagccaatatttgttaaaactcatttaatttggttatcttgctttaaggattatgcctctaaacaaccaacctatttttaaatagaatgatgttgagatatgcttactgctgtcagtgtgtggcgggctaaagagttgaccatcagcagggagagtgaggagtggggctttagcctgtggcagtacagccatgttacatgtgaattatttattacagatttgacatgactgactactttgatctttcatttgttggttcagtgtatgcaatgagaatattgtggaaatctttaaaaggttttgttgatagatttaatttcagaaaaacattcttgttgttcaatgtaacctttgtaaaatgaatcatttactctcaaccttggcagtcactgcctcagtagtaacttagggtattctagagaagggcccattgaggggggagtaagggagttactgtctcctggggtatacttttttgaattggaaattggaaatcatttcttttgggggagtacaacttagaattaaattgtctctacatagcctgacaatataaaatatatttactgtataagcctggaatataacaatttaatgttaaaatctgttattaagtcatgttttcaaatactagatacagtcatttaaggtcatagtcccaagttttagaatttacctatcaaattgtttctaaccaaaagttttgttttacttaagatactctgtttttgttcattaagtaatagctggtattgttagtatttgaaacaaacatacagagttcatcatacttggaagcaaggaatatcatttagatgctttttattcagatccattccttaagttggttttgtgtctgtagagtcagcaaatgattaattatacatgtgattccagagtagtgttgttgaagcagttacagaatcagtaaggaacatttagctaggtcattgagcttgactacttacaatctaacaaataaggaaatgtgaattagacagtagttgtggtaggaggacttgttttgatttatcttggttttgtcagtctagtttttattttgtggatgtgtagggggaggcaactatttcatgaaagaaagttaggtctttgaggtagacaagaaggctttaatctttgaagactgctctgtgggttgagcagtcaggggtaactttacttagattagtcagacaggctttgcactttggtcacataagtgcttatgtacaaagttggctccatggatctgcatatttaaagtatgcactacagatctatcctaagattgtctggtgttccacatgacttatgttctcagccaagtgctttcaaatacttggattgtctcaaggtgttcaaacctaataaagtagaaacatgccatttgaaatggtaaattctagccacatatatacactcttaaatatgtgtctctaacagtgttagacctggcttcggtttctacctccccagtgctgtcatgttcatgtttgtttttatgaaccacgttacttactgtaagatcattacaattttgctgacttccttgaatggaaacaaataatgacaagctcgttacaacgttcaagcaaacctgaaaaaagaaaaaacaactggcttagtggaattttcattcatggttgaaacattgtcgtaggatgataaaaatgtgagcctcctgattcttttctttcctccttaaaatccgagagtgtgtgtcatgtggaaaccctggagaagacagtgttgctagtctgttcctgttcgtgagaatgctttgaatggaggctcactgtgctgcggcggctgcggctgctgccggtgctgctggactgcaaagcagccagcggaaatgtgacaggctcctgtggcgtgagtgcaatgacagcgaggcgtccttgttcaccctgctagcacgtaagagatcgtggagagagaccagcacacgggaactcttgcccccattccttggccagatttgggtgctctgatgcacccgcttctcatacagcttttggggatcatggtgtagactatcaagaggattcaaaatgtctttctttgtattgaccatgtaagggattctaaagagggtatattgggactgttctgaagagcatccctctaaaatgtgtcctgtggcttgctagatatcagttgccttcttttgttcagctaaggaacttgaatgccttacctaatcactcaactggtagtaagctcgttttgtaaatgtgaaagtggatgttagaagtggcattcatggatgttcaatgtaatcaatagaccgtagtggcctggatgctttcacaagcaaaattccccatttctgccctccacccccatcctgtttccctggcacactgtatgaccttcaacctgaccagtgatatttgatagccttcctctccctctgtgctaccaccatttctggaaatgagatgtggtggccccgtcttgctgttggcatgatctgcctgagatgaacatgagcacaaccctcatcaactaggtctgcttggagtgtaaataggacggtgtaaataagctgctgcaattagtgtgagtgttgtcttgcctaaagagtgtgtagttctgcattttcctttgtagaagtttttctgtcactaaatgatccagcctgttgtcattaggctgggaaccgagcagtaagatagcaggaactggaaggaaggtttaatggtttagttaacgttggcatttatttatttagcctctcagtgcctaatacgacttttctccattttttacttggctattaattttttttgtaggttagattctgggaagcagtatatttatagagctcatctttgagtcacaatttgaaactaaaggaaactaaaaatataatttgtttgtaaactgaagtgtggtccccttttctattttcagagtttgttgacactttctacaaaaacttgaaattcaatgtgaatgtaaatctcatccatacgagacacagggcaaatgacgtctctcacgtttgtcaggcctctcctctggagtggctcagtgtgggccaactagttttctctccctgacccccaaatgtttattttaactttgtgttgctaacaaaaaagaattcccgcaaacactcgaaagaaaagttagaatatttgaaaagtactcagttgtctcagttgtccgcagagcccgtgtctcctggtgacctcactgactgacttacagagggcagtaggatcaggtgggactttacttttttctctctaacttgcttttaagcattttatcctgcattccagagtactgtagacttaagtattccctgttaacgtgtcacctgtcaccatgctttgtcctggggttgtcctcgtggcagcagcttctgctacctcacagggaaggtgtgtgcaggtggagagcctcctgacaggtctctggcttcaactgctgctgattttcctctgtcagattgtaggctggcctttactgtgaagctgagctgcatcctctggcccgttcctgttctgagtaggtggtgagccgcctttccccacagtgacagcagtgttcagtcttgggtttgacaaatgctatcagctgctccagacaaaacatccccatttctggaatttcagtccatgtttctgtaaacgaaaatactgaaggctttgcattactttgaattcttgaaggctaaattcagtgacacgttacagaatgagttagattggttttagcagtttttaatgctgaaaattttcacttttggctcagtttgatacgggaagaaaccccaaagtatttggattagaaacaagtcgtgatgcttgatcgataagcactttaactcctgtgttggctgacgcttctttctctcctggactgtagactatggcaccaccaacctatctttgtccattgtgcattgtatggcgtatgcacttgcaaaaatactctttaaaatagttataattttatcttttggttgtcttacccatggtggtcctttagatcctgtcaagtaagttttaataaaacactaggtagttatagaaaactgagaacaccacattgtcttttgattagtttgcgaaggtggagcaggaaagcctatccgattggaattgcaggcttcctagctgcaaactcttgagagctaggttgaaacccaatgacacctgcagagcggtggagggcggggagtgcctgttgtccacccctgcactgtggcgtgctgctgtttgttgtaggtagcgacgtactgagtgttccttgttagtaatctggagtcgtcctctgtatttacatgtactaaagtaactgtaaactaatggaacttgtaagaactttcctgtatttaggagcttttgtacagcaaggtcacatgtcctgattgaaagaagaagacatgctattacctatcatatgcaagggaaaaagctgaagtgaggagttgtctttgcattagctgtctgttgaattggggagctatggcacaggatcttaaatttgtgtttctcaaatgtgaattgtagtctaatgctgctttgtatagactaagtgctatggctagtctcagcactgaccgtggagtgatacctcgcagtgagcgcagcctttgttctagcttccccgactccgcagcactgtctgcgtgctggacagcttgcttatctgtctgctagcagagatacttcctgctttttcctttgttgttacatatttttatgtttgaaatttaatttttactactgttaatttaagtaaaatttgttccatgtataaattggcattgccagtgaaaatcaacagcctcattcatgacgctgctgaagtgaagtacatttgtgttctgtgttcatgaacttgcaatgaagccgtgtttcttttacgataaagtgcggcttaggctttatttctgtttaataaggctttctaccattgattaaatgaaggaatgtatctttttgaagagatttatattctgtaaataaacattggttgtaacaataaagttgagttctaac

SEQ ID NO: 485 - protein, 436 aa, Mus musculus
RTEASSRERPCLRVSALRTPSGRPVAPAARPCVRAAAALRRGRPGTEGSSSLPAPAALVVAVAVVVVVVSAVAWAMANYIHVPPGSPEVPKLDVTVQDQEEQRCRDGALSLLRHLRPHWDPREVTLQLFTDGITNKLIACYVGDTMEDVVLVRIYGNKTELLVDRDEEVKSFRVLQAHGCAPQLYCTFNNGLCYEFIQGEALDPQHVCNPAIFRLIARQLAKIHAIHAHNGWIPKSNLWLKMGKYFSLIPTGFADENINKRFLSEIPSPQLLQEEMTWMKELLSSLGSPVVLCHNDLLCKNIIYNEKQGDVQFIDYEYSGYNYLAYDIGNHFNEFAGVSDVDYSLYPDRELQGQWLRSYLEAYKEYKGFGSDVTEKEVETLFIQVNQFASHFFWGLWALIQAKYSTIEFDFLGYAVVRFNQYFKMKPEVTALKMPE

SEQ ID NO: 486 - DNA, 80815 bp, Homo sapiens
  misc_feature (1)...(80815): n = A,T,C or G
atttctagcttctccctctgtgtgtgtgtgtgtgtgtgtgtgtgtgtgtgtgtgtaaactggataaagtttctctctggtcagttatgcccttgggaacttgaccttgtaaccatgtggccatgctttctcttttcacaatggtggcctgggtttagggttcaattcctggcctaggggatgatcctttatcttctgtctgtctatgtgtttatatgtgttatgtgtttgatatttacatatgaaacagctttaattagtttaaaaataataagagcttaatattttattagaaaagtaaaaaagtataatgagttttagtcatgtgacttaagtaatctttgggaactaaagatcgttttttgtttttgtttttttttaagatggagtctcgctctgtcaccaggctggagtgcagtggtgcaatctgggctcactgcaacctccgcctcctgggttcaagtgattctcctgcctcagcctcccaagtagctgggactacaggtgcgtgccaccacgcccagctcattttttgtatttttagtagagatggagtttcaccatgttggccaggatggtctcgaactccagaccttgtgatccacccgccttggcctcccaaagtgctgggattacaggcgtgagccactgtgcctggccaagatagtttaaaaaattattggtaaataaagacatttggtctaagttatgcaggtcagatattaaatttagtaaatgctttaaggtcataaactgcttgaaaattgttcaatttatctatcttaaagccattagattctagataaggcctggggacatgtggaattcgccataccccctagctatacaaagaagattattaaaaaaagagattttatatgagaaaggatcttgtatggtaaattcttgtcttaaagtaaaatgactattgatgtttagggcaagtcagaaagcccaagaatgtctcagatggtctgtggaagtcatgaaaggatttgtgaaaggaatttatgcaagaaatgtacaattcaaaggttgttaggcattctaaatgcttcatacaatgccaccatgactcttactgtaaaacttgcctgcttaagtaaggcaaggcctggagacatgtagaatcagccacaccccctagctatgctggagagtcagctcttacatgcacttctgcctggtgtctcttaggctaggatccacacttaatacataattaaaatctcagatttaccaaagttttcaccaaaaatagaaattgcagaacgttaacattataacatgtaattaaaactacaaagaaacaattttacatggaaggtgtgtaaagaaagtaaaatgtgtttttggtgaaagagtataagaagtcatgggaaggtggatttttttctgcctacattaaagtgttaaaggattgtttaagaaagaaaaaaaattctgatggtttatgaaaacttaacctgcaaaaaagattctgtgtggacactggctaaagtaaaaggggtattattcagtttttctgcaaattaaccattggaataaaagcacaacagagtttccttttttttttttttttttttgaggcagagtctcgatctgttgcccaggctggagtgcagtggtgtaatgtaggctcactgcaacctcagcttcccgggttcaagtgattctcctgtgtcagcctcccaagtagctgggtttacaggtgcataccaccatgtccagctaatttttgtatttttaatagagatggggtttcatcatgtaagtcgggctggtctcaaactcctgacctcaggcgatccactcacctcagcctcccaaagtgctgggattacaggcgtgagtcactttgcctggcccaacaggtttttcttaaagcaagaacctccttatgatctgctctttaacaaaaattgtaaagggttgtaaaaggtttatgaaaattttacctatggtcaaactgattaaaattaaatacatttattgataaggtttcattaagaatttggtttgaagtcaataatgcactaatgaaacagtgacatttggcttatttggtataaaagttatataggaagcattatcaaatatgaaatggtgtttggtttcctttgggctgtaaatgtgttattagcatatgttccaaaattatgggaaacttctataattctaatatggcttagtgtatgttatgagtagttatattgttacataaaatcattgtgtgccacagaggtaaccaaaatttctttgtcaatcgtggttttgactgtagctgtcctaagatgtttttgtcatccacagacaatttttgtcttgttttaaccctctttagatggtggtttataatcagctatagaactctaacaggtattcttaaatgcaggtttctgataactttgaaaattgtgacattagaatagaggaaacacctttcagaactgtcagagagctaaagtgttcgtgaatatcaagcaaaacaggagttaactaaataaccagaatcaataaaaaacagaagtaatctttgtgactttttgcttaaaacattgctgatcctttgttttgtttttcagggtcaagaaaacttttcttttgagctatttacagcttgtagcaatcgagtaacctatactgctgtgaataacatttggagcatatttgtttctctacctgatttctctagaatttggagactatttgtgagctttctgaacttacagcaatgtggttatttgcataagtgcaataagaatcagttttcttttgcaacaggacacaattggagaaattggttattttaccaaggctttaactggaatggtgtgctttcctttaaggagtcaaacttgacttttaaagccaataaaagccctttggggaactggcctcataccttgcctacacagtcccttgtacagggtttctgacctgtggtaagtaaagaatgtcactttctcttaggcccagaaggcccaagttttcttgggaccccaagaggaaagaaatttacttaaatcacatattgagggtacaaacccatggcaggacttggctctaaaaaagtcttatctgagattccttatggaacaaagttctatcaaagccagttaaaaagcctatatggtaaataatgattcttgctgcagtttatacaaataatcaggccaagtttaataaagcaaattggtcttaccataatttgtctttagtaaaaatgggaaactggagacagagattatgtttcaataactatggtatacttgctattaaattctagtctcatcagttgtttttgcttctgcaatttaggccaaccctgcttattcctgtaaaccaaccagtgatctctggctgctgcttagaagaaacaagagggatggctaattaaacaggttgaagtaaaggagccagcccaaacccaccaaaaccaaaatggtgacgagagtgacatctggtcgtcctcactgctacactcccaccagcaccacgacagtttacaaattctatgacaatgtcaggaagttaccctatgtggtctaaaaagaggaggcatgaataatccaccccttgtttagcatatcatcaagaaataaccataaaaataggcaatctgcagcccccaggctgctctgtctatggagtagctgttctttttttcttttactttcttaataaacttcctttcactttgcactgcagactcgccctgaattctttcttgcatgagatccaagaaccctctcttggggtctgaattcagacccttgtcatgtaacaaccagagcacccccgggtttatatttagtgatcctttcattccctcatacaaatggtcattatgtaacaagtcagaaacagcttttctagtcttttatatgtggtataatcattatgacttaaatacacaatgtgggtgtcataaggcagaattttgtaggtgttttaacagatacataaaagggagaagtaaatttggactaggaaaatccagataagctccatgaagaagactgctggagagttaagctttgaaggatgagtgagggtgtaagaagcagacataggagacaggacattccaggtattggagggtcccaatgccatgtgaagtatgggaaagggactattaaatgtgttggatacttcaaaataatgttacatcttcatagctatgttatattctcttgacgtgtgttgcaagttgctggaatattttactgacaccctgtagctaagatttttttccagactcaaagataactagtgggctggccagtggtctaggaaataatcaggcaggtgatttcagcataatgagttaagtggatacagcccctggctgagggctattcttatgtgacactggcagagtttcagaactacttaggtgggcttaagcatttatttattatcttttatgttctaggcactattgtaggcagtggaaatgtggcaatagacaagctgtggctctgctttcctggcggtaacattccaatacataagagggacactaaaaaggtaaataaaaaatacactgattttagctgatctcatttcacagaggtcagcgcactctcccctctctgagagtgttactatgcttaataaacttttgctgctttgctgaaaaaaaaaagtgaatacattgatttcaaggtaactcacgttgtttcatgatatataaaaaataaaaacaggttgttgtgataagggaagtgatggatggaaatgcccctccagggaacaactttttagtaagatctaaataataggaagacacgtgaaaagaagccagtaggcagaaatcatgaggaagcaaaactaggcaatcagaaacagaagagaggtaaaaacaggtggagagaagacacagagaactcaactaaccagaagggctgttgggtttccagaactattgcttgaattttgacttctagggtccctgttggctcctgaatagatgcataagtagatgcatatgctccattttccatctttattctgttataatatattcctatctatctaacatctaatgatctattgatctaactgtccatccatccaatcattttcatattgtgggacagttaggttgctgccagtttttagcaacacaaggagcaagacagcagtgaacattcttgtacacactttatcaagtacatggtatgggatttttgcatgtacctggaattgaaactgctgggtggtaaaggatgtctacctttaacttgataaaaacctgcaaaattgttttccaaagtttttacaaataaatttacttctccacaagaaatgtacacttggcattatcagacttcaaaattttttccaatctaatggtgtgaaatggtatctcattattttaatttatattatcttaattattagacattacaattagggaggtatagtttcaaaagtttattggctatttgggtttccttttcttcaaactgctatttgtttgccagttattctactgggtggtttaactttcttatttattagtagtatcctgagtataaatactttttgatcatacacattgcaaatatctgatctttttatggcttgtcatttatcttcatggtatttttggtcatgaggtttcaaattttaatgttttcaaatttatcagtccttttccctcatagtgtgtgctttatgagtctgtttaggaatccttctttaacttgcaatcatagagatctgatcctatattttctgacttttttattaatttacatttattagctactactgcaaggcagtatgtggattgacaaaaatacaaatatgaactaaagtccatagtttatattaaggttcactctttgtattgcatagttccgtgagttttgaccaatttataatgtcatgtatccaccattataatatcatacagaatagtttcattgccctaaaaatctcctatgctccattcttcccttcttgtgacttggtccttcatttcttttcatcattcaataatgttccattttatggatgtagcagtttttattgtacattcacctattttcttggttgcttccaatttttgacagttatgaataaaggtgctagaaacattagtgtgcaagtttctgtgtggatgtaagttttcaagtcatctgggtagataccaaggaacatgattgctagattgtatggtaaggctatgtttaactctgtaagaatctgccagactgtcttccaaagtggctgtaccattttgcatcctaccagtgatgatagttcctcctcacatcttcatagcatttggctggttgtgttttggatttcagctgttccaatagatatgtgatggtatctcattgtttagatgttgaatatgttttcacatgcttttgtgccatctgtatatcttcttgatgagatatctgttccgatcatttgcccattttaaaattgggtttttctattgttaagtttaaggagttctctgtatagtttgaatagaagtcttctattgaatatgttttgcaaacattttttccagtctgtggcttgtctttacattatcttaactatcttttgcagagcaaaagtttttaattttaatgaagtacaacttaacagttttctttcatgggttgtgcttttggtgctgcatctgaaaagtatctgccaaacccagagtcacctagatgttctgttatgttgctttctaagaattgtatagttttgtgttttatatttatgtctatgatccattttaaattactttttgtgaaaggtgtaagatctgtgtctggattcttcttcttcttttttttttttttttttgcaagtgtatctccagttgttccagcaccatttattgaaaatttgaattgcctttttcctttgttaaatattaaatattagttgactatatttgtgtggatctatttctggactctattttgttccatagatctatttctctattcttttgagaatactacactgtactacactgtcttttttttttggttttgagacagagtctcactctattacccaggctgaagtgcagtagtgtgatcttggttcattgcaacctccgcctcccaggttcaagtgattctccggcctcagcctcccgagtagctgggattacaggtgcctgccaccacgcccagctgatttttatatttttagtagaaacagggtttcaccatgttggccaggctggtctcaaactactgaccccaagtgattcactcgccttggcttcaatactacactgtcttgattattggaacatatactatttttttttctttttttaggcaaggtctaattctgttgcccaagcttgagtgcagtaacttgatcatggctcactgcagcctcaatctcttgggctcaggcaatcctcctgtctcagcctcggagtagctgtgactacaggtgtgcaccaccacacctggctaattttttttttggagagatgaggtctcactgtgttgcccaggctggccttaaactcctgggctcaagcgaacctcctgcctcagcttcccaaagtgctgggattacaggcatgagccactgcacccagctatactgtcttcaagtctgtctgttttctcactttgtttttctttaatattgtattggctattctggctcttgtggctttgcatgtaaacattagaactggtttgctgatatccacaacataacttgaggtgattagaattgaatcagtagatcaggttgataagaactgatatttcttgcacatttttaaagttttgcttttaacatttaggtttctaatcttccccaaattaatttttatgcataataagagggagggatcaaaatttttttctcatacaaaaagcaattgtatcactacggttcattgatcagtctggactttctcactaatttttaatgctacttttgttatatacaaagttctcatatgtgtgtaggttttgttctgggactttattatgttctagtagtttatttgcccatacctaaaccaatatataatacatcctggtagggttggtcctcccaatatattccctgatcttacctgtccctatcctcctctccccaattacagcgcttttcttggaccttaagttttgatatgaatttcaatgtcattttaacaagttcagtaaaaaaacccttttgagattttaactggaattgcattatatgtactgattagttcagggaaaattgaggcctttacattaatcttttctcatttatgaatatggttcatttctccattaattttatccatggatcctgtacattttcggttacttttgttctcaggtacctaatagtttttttttcttttcttctacttgttaatggactcttatttaccattacaaactagtgcagtttgcaacataattttcaattaaattgttttacagttacatagttttaaaattcttaaaatgtcaactgcttaataaaaaatacaatttatacaaaaatacaagagatactatctgaaatgtgaaagtagtagtatatttatgatttctccccaaagtggaaggaacacacactctaatgtttcttgtagaaaattatgcctaaatctggcagggcgcggtggctcacgcctgtaatcccagcactttgcgaggccgaggtgggtggatcacctgaggtcaggagttcgagaccagcctggccaacatggtgaaacccatctctactaaagatacaaaaatttgctgggcgtggtggcacgcgccggtaatcccagctactcgagaggctgaagcaggagaatcccttaaacccgggaggcggaggttgcagtgggccaagatcgcgccattgcactccagcctgggcgacagagtgaggctccgtctcaaaaacaaaacaaaaaaaaacagaaacaaaaaacaaacaaaaaaaccactaaatttgaaaaatgttaaatcaacttctttgctgtattataaagctccatttccacccctctttttagtttaggaagtttaccgttatcggtgaagtaattattttgttaattacaaaggtaagtaggttctttctgaacaatcaggatgtaaacttaatgctagtgaagtaattaaacattttgaatgttaattaaactcagtccagttaagggttttatttactactaacaaacgtattcaccgtgtgctaagtgctgcagggaatcccagcccgttttcctccatctaaaaggaaaattaggaggtccccaatactttacttgtagattttcccagtttctaccannnnnnnnnnnnnnnnnnnnnnnnnnnnnnnnnnnnnnnnnnnnnnnnnnnnnnnnnnnnnnnnnnnnnnnnnnnnnnnnnnnnnnnnnnnnnnnnnnnnnnnnnnnnnnnnnnnnnnnnnnnnnnnnnnnnnnnnnnnnnnnnnnnnnnnnnnnnnnnnnnnnnnnnnnncttcaaaactattcctttccttccctttcttcttcataccagactctaatctgttctccctagcttcgaattattcactgtatggtcgaacatcttactccacaaataacctctgaagtgttgcagttgtcttacccaaatacctgaactcagcttgtcccgagtactgcgatcccgcgtactgctaatgggaatatagttaacccaactagtatgaggtccccagtacacagcagctccaagatcaaggcgaccgagtaacactgcttgcctagactcaggccaagttcggagagtgatcctggggttattttagaacgtgtcccttgcttcccagaaaaattcagtcgttaactcaagtccagatgcccaatgaccattcggataaggtgagctaaagcttcaatgccttgaggggcttggcagggctcgggctcatcccggagaagcagccccgctttccagactagcagttcccagggatgggtgtgtgctaatcgcaggccaacaagcccagcgcggtacagaggtcccattgtgaccggaggcgagaaaccccgcctcggcaccctgacgcagcgcaggacccgccccgcgcgtgacgccagcgtcaggccagccccggcatgctctgcggccgcccgcggtccagctccgacaacaggaattttctccgagagcgggccgggctcagttcagctgctgtccagacccggatcggcaacagtgccgcctccagacgttctcctgccgctcgcccgcccgtcccagcgcccccagccctcccgcgagggcgccccgggacggaaggatccaccagtctgtcggcgcccgccgttctcgtggtcgccgtcgccgtcgtcgtggtggtagtctccgccgtcgcctgggccatggccaattacatccacgtccctcccggctccccggaggtgcccaagctgaacgtcaccgttcaggatcaggaggagcatcgctgccgggagggggccctgagcctcctgcaaacacctgcggcctcactgggacccccaggaggtgaccctgcaggtaacgcccacacctcagctctgggtctcttatgcccctcacgcggctctgggggtcctcaccacaatcgcctctgtcccacgatgaccgaggaggacctagggcaacatctccttaagtctattgggaagtgaccctgtatttcccctcacacctaggagggtcactcccccttcccgtcgcagttgctctttgagattgacctgaggcacattttctctttctagaagccgctgcgtaagtgacggacccatccacggggggagattcctgctgatagttgcccctcctcccactccccagtccacggtcactgcaaaatgaacctttccactccccttgcacggggtcctcgtctacctcctcccctcccaccagtaatgcagtcattaatcctctctgatctttccttcctctcccctccccctgcgatgtgctttcattgatgcctcacactgcgttttgtcttcccaaaccctagcgtactcaattcccaaagtaatgaccacgaccatgcatcgctaggtcggttcttaggcagcaccacacacattgttttgtttgagtcgatatttctgaattattaaagtcgtcttactgaaattaatacctgatactagaaggagcagtggcttgtgactgtttccttttcatgagacaccgtgttgatagagaaaaaattgggaggaaaaaaatccctgagactctaggagttttctaataagttggaagttatgatttccactacgtgattttttttgaatactaatctgtttttagctttagtttcaggaactagatacaaaaatagatctctttttctccttttcccttgcaaacaaaaaaaaacagtaattttcaagattgggatatttgggatttgttctaaatctgagcaataatgtaagaacattcatttgaattagccaaatcatctgcctcgttttgatgactaatttattcaccaatatttgttgatttatttgctaaattcttcgctaaactagccagccacccacacaaagatgaataaaacatgagcagtgcctagggcccagaacagttcctgacacttgggttttcatgtgttagtttcagttcttattacctagaagagtttttaagcagattattttaaaggacccgtatgttttggagaagaaacttgttagacaacaaattttgaaatttaagggagtatttgttagccgagaatataggaaatagtgaatccaaagtgatttttatgtcatttaaaaaatatatttcctttaaaggaaatgtgtcttccaaattgaaattcagtacttgtttagtttatcaatttgtttgtattttattatataagactctaaaatttattaagatgatttgttttctggcagtcacttatacataaaacattattaattaaaaagtgctacttcctggtaaactctagtgttggcagatcagttacttttaagcagtgactttaaagtttaaagctttgaagactggaatttcctttgatgtatttgtctgtagaatagtaataatagctactgtggggttagttaaattattttttttttatcttagtcgcccaaacaaccatattaggtaggcactatcattttaggtgaaactcagtgaagtaagccaggatgtaggtaaaaaagggcaaaatgtagtgacattaaactgtttttgcttgttggaaagtaactacgtgtgtttaaatcttggtttcttgtagcaacttttaacctaaagacctttgggtttataatccgaatttttaatatttgtaagtgcaggtaaatactaccatttatttttccctaagatgattattagttagaaatacattccctccatgtgcaagcaaagctttggtctagaagctgtcctaaaagcatctgctaagctgaattgatgattattcacctttcaactcagtagatctggctccttgcattctaggtcattgcaaacactactttcataatggttcagaatttctttagtaaatctcaaaggaaatattttcttttgagattttactgtatttcccttgaaatagataagaatcatacctcacatttcagaggaagtatgtattatatagtcgacagagtataatgtaattttagagcagtcgagtatcagtaatgtagcctgtttttttctcagtttttttctaacatttttgtatgtttaagatatactttaaatgtactttagaaacttactgtagtaatacttatctggtgattgattattcctgcaagctgaactatccagagcatatcagaaaataaaaagaaaaaaacaagctaaaaaagacttactagagtcaaaatgatagaaggcccagtctttgctcagaatttgtgggtacatggagtaaatatatctcattttagacagaattcctgttcttactagattaaaagaataaattataaaggagatggtgaggttttcggagtatagtagcagaataggcagagtaaatctaaaacaacaatacagccacagtgctttgtatttaataatcctttactgtttataaagcactttcacatgcattctcccaactatcctgtgaggtagatgtagacggtactgttaatatgtatcatatagttaatgaaactgaatttgccgtttacaaatggcagatctgagatgataaaccatcttatgaattattgttctatgaccaagagttttgtttgtatattatgatttaggcagggaaggtgcttctgtataaaattaatttcttaaaagctttggctcataaaaagattctgctttaaagttcccttgaacataaatttgcattacttttttcatatgtgacaccattttaggaaaaagggattacttaagctttccttcacgagttacttttgttgtgtaacaactgtttaacttatttgaagattttgatttttaatttttatacttttctttggagagtcatcgtataaaggaataaagaatcaagtcagatctcaggtccataataattctcaacggactcttaaaattgtttttcattttctgaagagctgatgaattagtgtttggaatattccagttatgttgtctcagggtctttctgtttgcagtattaagcaacgttgtttttctcactaacttgtcactatgaatttttccattacttgggacttatagtagataatggcaaaggcttcataggtaggaattaataccgtaattattatttaacattacaaaactaatatatttattcctttgttgggtctaaatgagattgcttgctatatggtaccttatagcaacttagcttttcaataacagtgtgttacagtgctcaagagcatggggtttgaacacagtgctagttttgagtccagattctatactttactagctttgttactctggtcaaatcattaaacttcctgtctcagtatcctgagctgtaaaattgatccagtagttgtccctacctcaatgggttattgtgagggtaaaataaatgctgtctttcatgataattattattgctgctgagcacctactatatattggatacttgaatcaaaaaacaaatatttgctctttgaaattcctagtccgatggggaagacaaataagaaaattataacaacgtaatgtttatggaatgaacattcaaatttagttcacatgcaaagattacccaagaagtttaaaaaatgtactgttctttctgctttactacaggtttttgcctgttattgaatgcatattttaaaaaatcttttcatcatttttttaagcatatgtattctatcatggaaattaatctttgtgttaggttgtgtagctacacagcagttttcatatccttcctctttctaacagtgttggaggtagttacctaaataatctattaaaaacctgtaactcctcttaatattgatagttgatattttatattggtctttgccttaaaggaagaagaaaaagccagatctatacaattgctgtgttaagttatgtctccactagtgttctgatataataattgattttcttttctgtttttaaaaagatgagtttgttcctttaagcagtagcttctgaaaagtcttaggtaagctaatgtagtaagttacggctaattttttaatatattaaaaaagtaaacaatatattagtttactttccctaagattataggaaatcttgagtcctgtagatacaaataaggagtcatggtttatattcagtgtaacttttaatgttagtgattacatccagttttctgtttcctattccctccctgtcttcagcattttagaataataaagtatataatgtttaatagacgcccatcaaaaacatgaaatatttgttaggctcccatgtattttattaagatgtgactatgaagacaggagcctaaagtgctagtttgttttcctgtataatagccatgtaacttggactacacaaactgcgtcacatctttttggggactgagcataatgtggaaagaggatggtttttgaatattatttccagccatttataacctttggcaagttttaaagtctctataaaatggtattaccttggaaagtagtcatgagaattcaatgaaatacctacaattacgcatcgcatgttttggtactacgttcttccacctctcatttccaattctcccatcccaactgagagaattgtgagctcctaaaattcagtaattctgacatgtgttttttgtactagctgtaatgctagttttcagtaagagtccttgtacaactaactgtagcacaaggtaggcatagaagaacgtaggacagaaggcttcatagaggtgggggtacctgagctaagctttgaagggtagatgagatcagattgaaaagggaaacatttctgagcaaggaaaactatctcacaaaggcaatgaagctagactttgagtagcttactcatcatttaggacatcatgggaagccactggatatttttctttttgtattttattttattttattttattttttttgagacagagtctcgctgtagcccaggctggagtgcagtggtgtgatctcagctcactgcaacctccgtttcccaggttcaagtgattctcgtgcctcagccacccaagtagcttggattacagatgtgcgccaccatgctcagctaatttttgtatttttagtagagtcggggtttcaccatgttggccaggctggtctcgaatgcctgacctcaagtgatccacccacctcggcctcccaaaatactgggattacaggcatgagccaccgcacctggcctggatatttttaagcaggtaaattatatcatgtattagagaagtgacaggcaacaatgtagagaagggttgtttgagggaaatgttttaaattgggaaataatgatcactcaggacattggttttgaaactagtggttaccatacattaataggatgccaaatcaatatagtgtcttgagaccattacagtttaaaaagatgagttagaataagttatggtagaggttacatcagacagagccttgcaagtagtaaggtaagtactcttttttttttttttgagatggagtttcgctcttgttgcccaggctggagtgcaatggcgtgatctcggctcaccgcaacctctgcctcccaggttcaagcgattctcctgcctcagcctccagagtagctgggattacaggcgcctgccaccacgcctggctaatttttgtgtttttagtagagacggggtttcttcatgttggtcaggctggtctcaaactcccgacctcaggtgatccaccttcctcaacctcccaaagtgctgggattacaggtgtgagccactgcgcccggtggtaagtattcttttgtgaagtgtgctttagttttatgtaaaagtgtctatgtacatattatatcaaatgataaatatatttcttcctgtgtattgcatttaaaaagtttgagaaaataatttgagagagactgttgtgttagtccagacaagaggtgctggggcccagattaggacagatgagatggaaataaggtacagatttcacatttcagaaaataaatgtgcaggacttgtcaattgattacaggttagggaagaaagaagattaaggtgttttttgtaggggaaggagtggatgacaaagatagggaagtagtagaagacctttaagaaatcagaggttctatttctctttattttgttttctaaggagttattttactctttgatataccagattggctataaatacatttttaacattcttttaaaaattgtgaaaaacagcaaacatatagaaaaatggatgaatcataaattgttgtaaaacatatacccaccccaacccaggaaaagaaaattaatttccagcaaccaagtgtcttcattttccttcatagtcttgatctctccctccctctagtggtaatcttaatagcagatttttttttttttctaattaacaaaatagaatgttttgaattaattctgttttgaaaataagtactctgagaaaataataagtgcatgaaggtctttgtacaggaaaccgtatgaacatgaaataatttagttttactaaaaggttgtaccacaatattatattaaaactgaataggagaaaaaaatcaatttcctatcatcaatattctattcacaaccgttttatttttattaccttctacttctcctaaacatattttacatagttgcaatcatacgtataattttatattctttttttcactagccctttataaacattttcccatgtttgaatggtattgactataatttttgatagtcacaaacctaatatttgatgatcatgttaaacataatgtgacttagttattatttattatttttttaatttttacttttttttttaagagatggggtctcatactgttatccaggctagagtgcagtgatgctatcatagctcactgcagccttgtactcctgagctcacgcgatcccttctacatcagcgtccagagtacctgagactaaaggtgcatgcctgcctaatttttaaattttttgtagtgatgtggtcttgctgtgttaccaggctggtcttaaactcctggcttcaagtgatcctcttgcctcagcctcccaaagtgctgggattacaggtgtgagccactgtgccttgtatcagtgttttgcctctttttgaattttatttaatggcatcatatgaaatatgtgtttttttaaaattttggtttggcgtatgcccagattttgagagatttattcatgtgtatatagttgtagttcttttccatgaccgactagcattccattttaagaatatacctcaatttatatgtctcctactgttaatggacacctaggttgttttcatgttttggctatcacaaattatgcttcttacaattatactttttttgaacacgaatatccatttctgttaagtggatacctagaagtagaatttctgagtcatctagttgtgtattttcagctttgttagacactttcagttttctgaagtgattgtcccggtttatattcctaacagcattatgtgagagtttcacttatggtatatctttaccaataattgctattgtctgtctttatttttttctttcaccacgttggccaggctggtcttgaactcctggcctcaagcaatccacctgccttggcctcccaaagtgctgggattacaggcgcaagccaccgcacccggcctgttcttttcttttggtctgttttgtccgttactgtagcagtaccactctgtgtggattactctcaatcattgctacaggacttggtatttgatgtagttattataggctttggtgtaggactccagctttgttcgtttttaagattgccgtgactattcttgactttttaagttgccatataagttgtagactcaattttgggattcccacaaaagaaactggataggattttgattatattttgtggaatcagtagataaatttggggagaagtgaattcttttaacaatattgaatcttaaaataaatttttaatttctctcaaacttttgaagttttcactgtggagatctcacgtgttttatttgatttatccctaggtgttgacgctttttgatattattgtaaagggtatcatttaaaaaattactttattgttggtatataggattataattaattgctttatactgaatttttttcacacactctaaaggtttttatgtagattattttgtattttctctatgtataatctgaaaataatacatattgctgtctccccttctgtctttttgtcttactgcactagtaaggacctctctaacacacttgaaaaagaagataaaaggtgatagtggtcatttttatttcccagtcttaaggagaacattttcaataatttattgttaggtatgatatatgctatagattttctttaatgactctaccagattaagcaagtttctttttattcttagtttgttaagtattttcatcatgaatgatgaatttggccaaatgttttttctgcatttcatgatgattataagatttttcttaatttttctcttattgaggtgaattactttgattgaaaaaaaatttgaatgctaagtaacctttgcattcctggagaaaaccctatttggttgtatatagtctcttttttattactgtatcaattgctaatattttgattaggatttttgcagctctgcttatgaaagagattggtttgtaattttcctttcttatagtgtccttgacaagttttggtaccaagttcagaggtgtttcttctttttctatttttggaagagttgcttttaataatacatgtttaaggtctgtagtgaagttcatttctttatcatttgtgttgctttattgtcttcatacattttgctaagaagttatcaactgtattaatcttttcaaagaacaatttttgtttgttttgaggctgggtctcactctgttgcccaggattgagtgcagtggtgcgatcatggcccactacagcctcgaccatgtgctcgccccatgcccggctaatttttgtatttatttatttatttatttgtacagatgggatttcatcatgttgcccaggctggtcttgaactcctgagttcaagtaatctgctcaccttggcctcccaaagtgttgggattacaggcataagccatcacatctggcccaaataataatttttgactgttgagtttttctattttattgatagttttgtccttcattatttccttcctaatcgttttttgaaggttgattggctgttatttttctagcttcttgagctggaagcactaattttttgccttttaaatttctattattcattacatgtctttgtaagtacccacaagtcttgacatgtgttggaaaaggcggtctcatgcacacagcctttccaccccttctcaccaaataaaaatgggccttgggcctgaaacactttcttaccaagcgatagagtcctcacagcctgtgctggacctgtcactctgtgtgaaatatttttccctgttttacactcagtgtgtcctcctttgctctgcttcagtatgtgtgtcatatgtcacctggctcaccttcagtatctccccattgggaaggggatggagggacagggttggtctgctgtagcccaagaagggtgtgtgtagaccagttgttggcatcagctgctgggaggaacttgctcaccatgggataccaacacctattactgaagctgatcttgctttgtctcctctctgtgtaagtaaagcgttgttccatgcagtgcttgactgtgcatcgtgttttctttggtgactatgataccaagatacaatgaacagaagttctaagacttctactcctgatattaggtgacagataccacttgcttgacaatatgtgtttattatcattcagttcaaaatgttttctaattgccattgtggtggttttttctttatctcactcattttacatatgtatttgattcatttccaatgagttgatgcatatttaattttttaaaaaaattgttataaaaacataaaaatttattatcttaaccggttttatttggtgtgtgtgttattgctatctagctcatatccactgtagtttgagatgatactctaagtgattttcatcctttgatatttgttgaggcttgctttataatgaagcccatagtcaattttggtaatgttttgtgtagtcttgaaaagaatgtatgttcttggccaggcacagcccagcactttgggagcctgaggtgggcagactgtttgattccaggaattcaagattagtctggccaaccctgtctctacaaaaaaaatgcaaaaagttagtggtgatgcatgccttagtcccagctactcgggtggctgaggtgggaggattgcttcagcctgggaggttgaggctgcagtgagctgtgattgtgtcactgcactgcagcctgggtgaacagagtgggaccctctctcaaaaaaaggtaagaaaaagaatattctgttgttgagtgtagtgttctgtgtatgtcagttaagttgaatttttaattttgttgtttagagctcttactacataatgatttttctctgctaaaaaaaaatgaggtcttggaaaaaaatagtgtcatctataagcattaaaaaaattaaaaatgaggtcctgaatggtgtgctcaaatttccaacatttattatgggatttgtttaattctgtaagtttttgctctatatcttttgaagctgtattgttggatacatgcacatttagaatttttatatcttcttggtggatcaatcccttagtcattataaaatgtccctccttatctttagtaatatttcattaaggtctattttatttgatatgagatagctacctcagcttccttctctatgtcttttgtaagcagcatatagagttgtcctttcatatccatgacttctgcatccatggattcaagcaactgcagattgaaaatattaagagaaaaaaaagatggttgtttctgtactgaacatgtgcagatattttttcttgtcattattccttaatacagtataacaactatttacataacatctacattgtattaggtattagaagtaatctagtgatgatttaaagtatatggcagaatataaataggttatgtgcaaatactacatcattctatacaacaggctttcagaacgtgtaaaataatatgaacaaaaaaatttaaatcaaaatataacaggcttgagcatttgtagattttggcattgttgcgggggtgggatcctgcaccgaatccccctcggataccaaggggatacagtgggaccatttgcagatcctctagagtgctctctcctgtctgtctccctgtctttccgctttaatactctgtcctgcatactctagctgttttgatatcctccgatgctcagtttatctcaattaatgaagtccacacaagctccatctggattctctttccctttgctgggacctgagaattctctcaagacattaagccggggcagtcatagagttcacgttgtttgtttcccatctctcagggatcactgttctctctaaagtccattgtcttaaaaattgtcatttcatatgttttgtctggtttttatttgtgggagaggggttgtttcaagtaaaagggtaaaatcctgtccccattactttgccttggccaagagtgaaagtggcccattagatgatttttatcagtgattttcaaccttttctacagggttagaattctttgttcaagtaaaatcttatccccaagtgtcatgtgtatgtgaaataaatgagggcaagatggtggtagtgtagtatatgtgcacatgtgcctttgtatgtgttggggatatagcagagcttttttgctgacttggattcctattcccattccttgagggctttatagcccaatttgaaagtcactaatatagagagtacaaataggtatataaaaaagtaagcaaatgagaaaataagccagttattagttacagaggaaacaaactatccaggaaaggaaatttacagtatatctcattttggggtttggaaggatgtgtacaaaatagtgtaattgaaaattgataaaataaaaaatcttatatacttatattgggtaaaggaagataggagaagtgacagagcgagagagagagagtgtttatgtgtgaaggaaataagaaagctcagtcttataagaagtctcagataatgtgtagactttacagaaaagcagtttaagaatggtatttaaaaataaggaattaaataacatgagagttgaaaggtagtttagggggaggtctattgttgattgataaaaataaaaattacaaaaaaaaagcatatggtaggtttggaagtggaaataattgaatacaaaattctcttgcaagaaatttggcagagaagggaaggagaaagaagttggcctctagaagtgggtgggatacatggccacataatctgtttttccatctcaaaacacttggaccttttaacttttttccccctttttaacctgtctttaaggtggggttttttttttttttgagacggagtctcactttgtctcccaggctggagtgcagtggagcgatcttggctcaccgcaacctttgcctccagggtttaaatgattctcctgcctcagcctccctagtagctggaattacaggcatgaaacaccacacccagctaatttttgtatttttagtagagacagtgtttcaccatattgaccaggctggtctcgaactcctgacctcaagtgatccacctgcttcggcctcccacagtgctgggatcacaggcatgagccatcacgcttggcctgtctttaagttttatcatttatttgttttggaatctgctagcaagtgaatcttacatacttgtgctatattatattatataattctctaatagaggctctaggatttctcattgatgcttttatgttttgtaattctctaatagaagctctagagttcctcacttatgctttgattagttgtatcatgcaagttaaaaattataattttgtaacatacccaaattgagagaataaaatattcatatattatccagaatccgtatttgcttcattttttaacccctttaaagtattttaaagcaaatctcagtcagaccttgtctttgtctttgtgtatttcagtataaatttgtaaacataaaaagttattttttttgcgtgatcacagcaccattagaacactgagcaaaattagcagtaatgtctaagtactgtttaatagtcagttcataataaaattttacctcaaaaagtatttttatacgtatttgtttgagttaggaaacaaactagatccatgcgtttgtatgtttcataagcctctttaaactagactgtatgctattgactatttattggtggggcgtttgtgtagaaagacctacattctggatttgtatattttttgttgttcttctttgtggtgttttttaatttttaattaattaatttatttttttagagaagtggggttttaccacgttggccagggttgtcttgaactcctgaccccaagtgatcctcctggctcccaaagggttgggattataggcatgagccaccatggccagccatgtggtgtttctttaacccctatattttcttaagaataggaagatctggccgggcgctgtggctcacacatgtaatcctagcactttgggaggccgaggcgggtggatcacctgagatcaggagctctagaccagcctggccaacatggcgaaaccccatctctactaaaaatacaaaaattagccagacatagtggcaggcacctgtaatcccagctacttgggaggctgaggcaggagagtcacttgaacctggggggcggaggttgcagtgagccgagatcgtgccacttcactccaacctgggcaaaagactgagactctcaaaaaaaaaaagaggaagatctagaaccttgattagatttcaaatcataggtagtgcagtgtatttcatattgcatcacatcagaaggtataacatgtcaggttgtttcgtgaaatcaggaggtgacagatgactcctaccattataaaattacctatcaatctttcatctaatggttttattcattgaagattgtttcctgaatactttttctgttgtatcctccacatttgtcaacgggaattctttggtagataactttctctcattaattagatcggtttggatattatgaaatacagtttgtagaaaatgtaggataaatgcttaattctattttaattgccaattttcagagtaacagtgataacttcatcaatattaagcaattaaaaagtagacccttgggttgttggaatttgttaaagggtaagtttaaattgtatttttaaccaatatagatgttgtttttaaaaattatgtgatgaggtaaggcagagaacaaattgagaatccattattaatttccctagtatttaaaagctgttaatatttaaactaaagattagaagtgattagtagctaaatttactagcttagtagtatacattttagggattaaagtttaacaggatataattcgtcatgcaaaaccaaacgcatatagggtagtactaacttgagagagtaacgttgaatggcatttctaactaaattgaaagcctttttttttttttttttaagatgtgaaagagaatttgcccagaaatgatatttaacatttagctatttggatttaagctacttttagagacatattgaaattgttgtttttaaatattgttttaacatatattttagtcttaattattattttataatttcatcattactttgctgttttttattgaaatttaaatgtatcattggctacatttacgagcttacggtgtgccaagcactgttctaagtacttttatgtgtatcaacttactaatcttcagaacaatgcaagaagtaggttctaatgtactgattttatatatgagatagagagacacagagggttggtgacttgcctaaggttactcggtttgtatgtagcagagctgggattcaaactcaaactctggctctgtagctcatcctgtcagctactactatctgaaatacttgacaaatagtgcaggataaaccccattaaaaggagctcactaagatttatattttgtctcaactctactgaggtggaattttatatttctagtatatatttaatatagtatatatagctagagtgtgtatagtgtattttaatagtatattttagatgattcagcacattgagttacttgtggtttatgtatgaggtgggaacaatgcaaaggtaagaagtattacctgtacatctttaaactgaagtcattgttctccagccagagaccagtagaaactcacctgtagctgaagaagttgggtttattactcactgcagtaagggagaactacattgagaatggtggggatttgtctggtgatttgggggagggttcgaggtaacggtattctctggattggatggtgtcaggaaggaggtgggacaaatctatgacttatgggcatcttaatcgtacctagaacgctgaagaaatgaagcaggcccaaagtttgactggaaaagagcagcagtcactcatattagccaggataaggaggtatttggtaatttttgtcatttggacaaagttcctatttttttctaccttcagacatgattacagagtggttttgttgttttcttgacccattatgatcacagagtaaccctatctaatgttgaatgttgatgttctgtaaaacagtttatgttcagcatgacttcaaggcctagtgagtgccaggccgttgttttgctactaatttttccactagtaaaccaggttcattgctgtaaaactacaagttagtaaacatacctaagtcaaaagaaaaaaggttaaattacttatggagaaacaagaaaataaagaaacaagatttaaactacctagtatctttgtagacaaataaatatttatacataaaatattttgataaatgcgagattatattattcacatatctttttattctagcggtttctttccagttatgtagctgttgtgcaatacagaaagttagggctagtgtcattggagttgtgacactgtgtcttcttcataaatgtttaattagtgttcagtaatttgtattgagtaatcatatctgtctctagcccttaaatgcacacatctttttatgtttgtacaaataaatgtataatatagcatggtcaatttagggataataagagaatgcaatttttataagctagatgaagacattaatgttggtagctatacgagttctagtgtttaagtattaagtacctactgtttgctgtgaagattcagaaaatggagatgatgatttctggagtttgaggagcctagagtttctttcattataagcatttcagaatgttaaaaggtttctcaatctttattaccgtatttgaaatattttatctatgacatatgaagaagttacagaacagcatgtgtgaattgatagtggcattgtgataagaaataacatgtttttcaatgcagattttaataaaattatgattatgataaaaaatagtcattttaagtatatattcttcctgacagtgtctttcatacagtctttttgaaatctaggtggaaggcaacactagtatgcacatttttaaaaaatggggatattcaaaataagtccctttatactagttcatgaagttttactgcattatgtgaataaaggtaacagctaagccctatatataataaaaaccattatataaacactggttagttgtatattattaatagttttagtaaatactttcacatcttttttcatatgtcatttaatatcatatcaatctaattgagatagaaatatttaccctctttcttaagcattagttaaatgtatatacatacttttaaaacttctgttctttttttctattcttgccccattgacatgaaaaaaatgttctgaattcttgctttcgcttttctcttttcttcctttgttccacttgggagccttcaaaagttctgaattataatagaagtgaagtgttagttctagtgtcagattaatacagaggaaaatgaaaattacaatttttaatagacttttataactagtattgctaattacctgtttccttttgaaatacaccgtctgtgctcaaatctaaaaaaggatttgaagtacttgacttaaaggtcttgacaagccccaaaagtcttatttaaaaaataccatagaaatctctacttacctcttttttcttcctgtaaggttgcgtttttgtttgtagccatagtggttaaattataatagtcaaaactgttatactctgagtgtataacacaatgtttaatgcatgttttgttagataatctttaaaattaatatataaaattgagtttttagtaagttggagatttgccataatgtaaattatggtagattatatttgtatatttattaacaaatctatgaatgttgttaaggacttctataagtaatgaaccatactaggaatagggcagtgttcccattctcagagactttccaatctgttggacataggagagattccctgtatgtgtacattccctgtatgtgtacacacacacatacacacaaatgtgcaaagattgtgatacaaggcagactgtgagaaatggcaggtatcaagaaagttatatagaaatattgaagacagaatgtataattaacactttggatcaaggaaggcatgttatatgaattaagggcaacatgttaacattagtggttctctttgtttaaatatagaattaaaattatagatgttagataaaattgtattcaaagatggttcttttatgtgaagaagttggtgttttctttaattagtatttaactcatgattttcaatttatctcctgttctctaaagatagataattgctttttttcccatttttaaaaaaaatttttggcagctcttcacagatggaatcacaaataaacttattggctgttacgtgggaaacaccatggaggatgtagtcctggtgagaatttatggcaataagactgagttattagtcgatcgagatgaggaagtaaagagttttcgagtgttgcaggctcatgggtgtgcaccacaactctactgtaccttcaataatggactatgctatgaatttatacaaggagaagcactggatccaaagcatgtctgcaacccagccattttcaggtacattttcttttctgaatttttccttttgaaaaatatgggcatttaagtgcattaaggaaatattttttaaaattgtctttgtttgagcaactatttggttaacttagaaactttctttagctagggtttttgtttttgttcttgttttccctaaaaagatagaagtaaatttctttatatttgcagtttatcatcgttgactctttgcaaaggaaaaactacaagatgttttggattaaccggctgcagagggtcaaggcttctgcttagttttttctagttagtgtttgagttgaagtgttatacatttcttactgccgattgcttattacttaattgttcatgttttcagagttcttgcctattaaaattttattaatttggttaacaattctttgttctttacgttgttcattatttaatttaatatattatgttttctataaagaataatgtcatatatgcttgatcatttttccaaaattgccagctttaaaaattctctttctgctcttgaaaactctagaaaatggtctggatttgaaaacagcattcataggttagaccagcagtttgcaaccattttggtctcaagacctctttatagctctttgggctctttgttttaatatttgattaatgtttatcaatatttaccatattagatattaaaacaaattttttagaatacaagaatatcaagtacatgtcctgttagctatcattgtgatgaaattatcacatatcatataacctcttgaaaggtacactgtacacttgtgaaagagtgagaatgagaaaggtaaataacgtcttgtgaaaatagtttcaactttacaaagctcctgaaaggatttcggatggcccggggctccctggatcataggttaagaattgctaagttaatacactgacaaaaatggaatgtaccagtaacacttatctattgtaaacctgtatcaaataatatattaaaatattttgtcatagaaatctgttcaaaccctagtttttagccatcacatatattttcttcttttacatgagtctagtctttagatgtattaaaagattctgattaatacatttgtgtttactgtgtgtcaattgttttgtggtctttaggcttgcatgtatttataaatcctcaatcttgttcacaatggttgacaaatacctatataacagcattaaaaattaatagatgcatagattggatccccccaaagctggttttgtatatatacaaaaacatatttcatgaagttcctagagaagggccacatgagtttccttgtaactaaagcagagagtaaaacatgattgatctatttcagtaacctcaaatagaaacagtaaaataattatagtttttgatcaagaacagtgaaggtttgtcaaggctgactttggtatttgatacaatgttataaacatgttttcagtaaaaatatccttttctatactttttggttagatctacttacttattatttctttcccaaatgccaaagcctttgtttattttttctctacttagatctttttaaaaatatattttttattgatatatcatagttgtacatatttttgtggtacatgtgatattttgatacatgtatacactgtataatgatcaagttagagtaattggtgtatctatcatctcagacatttttttttgggttgggacattacagttcttcttttctagctattttgaaatatacaataaattattgttaactataatttccttgctgtattattgaatgctagaacttattcctctgatttaactgtacgttcatacccattaaccaacttcttttcatcaccccccttcctagatttactcagaatatgtataagtgatactaatgtaggcatatacacatttcataaaaagaatatactgtgttagaaaccaaacatcaatactctgaattctttgacagctggcttgtaataagtgatacattgaattgccccacagttttgcagaggagaagcagagtggaggccgagaaagtaagcaaaagaagatgacactgaagaaccctgtatgataggatattgttagttggcattatgaatagtaacatttgctatttaatttgtttcgctgttaaatttatttcagactgtattctaattcctatggcatttcttattgttaagcaggtcttagtcactataaaacagaaaatatgaaaagaaaagctaagggagggaaaggcaagttttgattaacaaaacgtctgagttacacatgattttaaataggagtgtggttttatttttttcaaatatgtacggtgaaatacttctaaaataccaagtaagcagatcagtagaccatggtctggagccccaagaagaggttaaagatgtaaatttgggatgatgtgcttatttagccccttttaaatgaattttatattctgtggttaaaaagaatctttgatttgttaatttaatagggacttactgacaatttggggttagttgtcacattttgattaatccttatgagctttaatgtttgaatataataataaacttttaagacactattgattgttaggtcagcctaataatatgcatgcagtgatctggactgattgatcagtaaatgttgatgagcgctttagatcaaagtccacagtactttcttgaattggctcattcaaccatagctgtatgcttatattatgattatgacgaaggtatctcatttgaatgtaaaaggcttatgtttatgtttggactagtctgggggaggaagaagaatctaaactgtccttgctgtcttagtaatttacagtttgtgacacagtaaccttgagggaaaaataacctaaatattgtacaaagaagaacagaaaaggctttcagagaaagtacaggtagttgattttgggcatacataggaaattagtatgtttcactgtgatcacatttgaactgaactttgaaggacaaggtagcctgtaggaggtgaggaatggtataggtaaagacaatgagctatagtgcctgacgggtaattccacttatggaaatttatcattctctgttttatttgagcttttttgtagcaatcagttattacggacaccttcagaaaattttttaaaattcaaaagtgtttagaaattttttcaaatttcttatcagatatttcttagaaatttgcctcttgtcaagaacctggctgaagtttaatgacaaaccatccagtaacagacataatggaagaaatgcagtttcaaatcaattgttgcaagtttatcaaagagcatactgagggtaccgtagtggaactggcaccttgtgggttgtgtgcatgtacagttggtagtgttttcttttggaaatcaaaaggacaatatataataactcaaaagaaagttatatgctgtatttctggcagcaacaattaaaagtctcttatattcagatataactaaggtacctcaacacaaaggagaattatgctactgttgaaatgtaactttttgactattgtctaatacatgcaaaatggctgatgcagggcaacaggaaaaaatcagcttaaaaaatagcttaactgtggctacaattaggcagtaatttgctcatgcaaaaactcaaaggggatatataaaaatgaaatactatgggatggtaagattaaagattatttttcgtttcaaaatatttttgttattgttagaatacatttaattttttaaaagctttcaagagaagtaacaattagtgttagtgaatatttgaggaattctctgaagccttgagggtttgaaacatttggctttaacgagtatggaattttaaagcagcgtttgacttgatgttactgtagtaaaacctcgcttactgagacaaggtaggagaaggaccaatatatgatagtgaaaatcagatatcttttaaatgatttttaattaccttcttatatatacaaaacataaattaatgattattaaataatgctaagttatctgaatgaagagattttccttttaaagattttagttttttagtgcatttttgattcacagcaaaactgaggggaaggtacagagatttcccagatcccctccttcctccacagacaacctcccccattatcaatatcagagtggtacttttgttataatacataaacctatattgatgcaccattatcacccaaagtccacagtttacattagcgtacactcttggtgatgtacattctgtgggtttgggcaaatatataatgcatgtatccactgttagtagtatcatacagaggagtttcactgctctaagaaaatcctctgtgctctgcctattcatccctcttttccccttaaccagtggcaaccactgatctttttactgcttccacagttttgcctttttcagaatgtcatatatttggagtcatttaattaagtagcctcattagattggcttctttgacttagtaatatgcatttgtttcttccatgtctttttatggcttattggcagatttctttttagggttctgaataatgtttcattggatatgcaccaaatctattttgttcattcaactactgaaggacattttggttgcttccaagttttagcaattatgaattaagctgctataagaatccctgtgcaaattttaatgtagacatacaaatttttaactcctttgggtaaatgctgacgagcatgattgctggattgtatggtaagagtatatttagttttgtaataaaccgccgaactgtttcccagaatggctgtgctattttacatttccactagcaatgaatgagagttgctgttgctccacatcctcaccagcattgggtgttataagtgttttggattttggccattctaatagatatatagtggtatcttactgtttttgtttgcatttccctgatatgtgatatggaatatcttttcatatgcttatttactcatctgtgtatctttgatgaaatgtctgataaggtatttggtccatttttaaattgggttgtttgtgttcttattgctgaattttaagagctatttgtgtattttggataataatccattattggatatgggttttgcaaatattttcttccaatctgtgctttatctttttattctcttgacagtgtcttttgcagagtagaaagttttaattttaatgaagtccagcttatctgttcttcctttcatggatcatgcctttggtgtcatttttaaaaagtcattgccaaatccagggtcatctacattttctcctatgttatcttctcatggaattttagttttggattttacatttaggtctgtaatccattttgacagaattttaatgaagagtgtaaggtctatgtctagattcatgtttttgcacgtgaaggtccagttgttcagcacaatttattgaaaagtctatcttttctccattatatttcctatgctccttttcaaaaatcagttgactgtatttatatgggtctgtttctgggttctctattctgtttcttcatctgtttgtctaatcttttgcagatatcacactaccttaattgctatagctttatggtaagtcttgaaatcaggtagtgttagtcctccaacttgttcttgtctttcaatattgtgttggctattctgggccttttgcttctccttataaactttagtttttacattttaaaatggactttttaagaatttatttttaattgacaaataataattgtgtatatttgggatacagtatacatgtaaactttagaatcagtttttcaatatcacaaaataacttgctgggattttgataggaattgcactgaatctgtatatcaaattgggaagaactgacatcttggcagtattgagtctttttatccgtgaacatggaatatctcttatttagttatttggtttcttttatcagagttttatagtcttcctcatataaatcttgtacatagtttgttagatttatacctaagtattgtatttttgggggtgttactgtaaaaggagtgcattttattttcaattttcacatattcattactggtatgtaggaaagcaattgactttcatatttttttaatcctgcaagcttgctataattgctcattccgcgaggtttttttggtccattcttttggattttctccatagaaaatcatgttatctatgaacaaagacagttttttttttttcttacctcttattttttttcttgtcttaatgtgttagctaggactttcagtacagtgttaaaaaggattggtgaaaagtgatgttctttctttattcctgatcttagtgggaaatcttcaaattacgtgtcattaagtaggatgttagctgtagttttttttgtagatattctttatcagattgaagatactctctctttattcctagtttgctgagtttttatgataatgagtgctagattttgcaaaatgctttttctgcacatgtcgataggttcatgtgatttttcttttttagtctgttaatgtattggattacattaatgaattttcaaatattgaaccagccttgtatacctgagataatcccacttggtcacagtgtataatttctttttatatattgttggatttgatttgcttgtgttttgtgtcagcaaatatattatataaaaaataaacatttaaaaataatcttttaaataaataggaaatataaaaatgtagcattttctgttgtatataatatttgctagcagaaaacaattgaggtatacttgattaaagtgtttttaagaattctttttcaatgagcattttatttagttaataaaaatttgatttgtttatagttgttctgaaaaaatttgattatggtaaatgctacataaaatttaccattgaagcagcatttttatctggggtaatacctgaggttggttgttccacaactacagaaaactaggatacagacaaccagagtgaggttaagagtggaagtttaataggcaaaagaaagagaagagctctctgtgcagagaggggtcccagagaaaatgggttgccagttctgtggtgtaatgtacagggttttatagattaacttgaggaggcagtgtttgatttgcagagggcacggaagattggtcggaccaggcgtgccttttgcataaagcatgtagaagctggtggccccactttaatcttttattatgcagatggttctctacttggccagtgccatgttgcctgcctcttttactagacacatggtgacaaagaaaagggaagatgaaggctccgttgtgaacatacctgacttccaggtagcccttttctactggcacagctgctggcattcactcatgcaagcttctagcttgcttatctatgtctgcagcttgaattttcaggctgctctttgttagaagtgatttgggggctgctttctattaaaagggagtccttaccgagaactcctttaccctcactatctgcctaaatcatttctttctggctccagttgtcaccatcttaaccattttttaaaaagtacagctcaatagtgttattgcattcacatggttgtgcaactaatttcctaacatattttttttttataatgtaaaactacaattctatcccttttttttttttttttttttgagacagagtctcgccatgtcgcccagcctggtgtgcagtggtgcctcccaggttcaagtgcaatctctgcctcccaggttcaagtgattctcctgcatcagcctctcgagtagctgggactataggtgcccaccacctcgccctgccgagttttgtattttttagtagagacgggtttcaccatgttggccaggctggtctcgaactccagacctcaggtgatctgcccacctcggcctcccaaaatgctgggattacaggcgtgagccaccacgcctggccaattctatgctttttaaacaacaaatcttctttccttcctccagcccctggcaaccgtcatctactttctatccctaggaatttgactacttaggtacatcatgttagtggaatcatgtaatgtttgtctttttgtgactggcttatttcacttagcatgaacacttcaaggttcatttatgttgtatagcatgtgtcagaattttcattttctttcaaggcttaataatattcctttgtatttatatactacgttttgtttattcatccatggatgtatacttgggcaatagtcacttttggctattgtgaataatgttgctgtgaacatggatatgtaaatatgtttttgataccctgctttcagttctttcgggtgaatgcccagaagtggaattgctagatcataatggtaattctggttttaattatttgaggaaccaccatactgttttctgtaatagctgcaccattttatattcccatcaacagtgcacaagggcaccagtttctttacattcttaccaatagttattttatttttgtagtaaccattctaatggatatgaggtggtatcacattgtgcttttgatttgcgtttgcctaatgagtagtaatgttgaacatatgcttattgaccatttgtttactttttctagagaaacacctattcaagtcctttgcctattttctcatggggttgtaatttttgttgttgagttgtgggagtttgttatatgttctgaatattaactccttgttaaatatatgatttccaaatattttatctcattctgcaggtttctttttcagtctgttgattgtgtcctttggtgcgtagtttttaattttgatgcggtagagtttatttttacttttgttgcctgtgcttttggtgtcatatccaagaaatcattgccaagtatccagtgtgatgaaggtttccccctatgttttctcatgagagttttaatagttttagttcttacatttagatctttggtccatcttgagttagttttcatatatggtgtaaggaaagggtccagcttcattcttttggatgtggatatctagttttcccagtacattttgttgtcctttcctcattgttcttcttttcccgttgttgtcctttcctcatttaaggttcttggcacccttgttgaatactgtttgtataattgtgggtttgtttttgggttctctgctctattccatttatctgtatgtttttctttgtgacagcaccataatgttttgattacagtggctttgtgtaataagttttgaaatcaggaagtgaaagacttccaactttactcttctttttcaatgttattttagctactcgggtcccttgagagtccatgaattttaggatagctttttctttttctgcaaaaattgcctttgggattttggtagggattgcactgaatctgtggatcacttttggtggtattgacatattaacaatattgttttccaatccatgaacatggggtgtctttctgtttatttgtgtatttaatttttttcagcagtgttttattattttcagtttacaagtctttcacctcctcaattacggttattcctgagtatttatttcttttcgatgctatcgtaaatggaattgttttcttaatttcctttctagattgttcattgttagtgtaaaagtgcaactgatttttgcgtattgattttctgttctgcaactgctgaatttgatttttagtaaaaactgtaaattttcttaaaatcattctttacaaatttcatgctttgttcagtccttatttataaaaaattttagatgagtatggaacttgtgattaggccatagttaattttttaaatctcttcacagagcctagtttttaagtatataggtggctgccatggttacaattgaagtgtacttatttccatgagaagatttgtgttgtaaatcaacttccttcctttctgctatgatctgaatatttgtgttccctcaaaaaccttttgttgagacctgattccaatgaaatagtattaagaggtgtgtccctttggcaatattagtcatggggtagagctctcatgaatggcattaatgcccttataaaagaggcccaaagaaatttacttgccccttctaccatgtgaaaatgcagcaagaaggtgccatctgtaaggaacataactatgagaaagaaatttatgtcatttataagctaccttgtttatggcatttttgttaaagcagcctgaaaggactaagacactttacatgttaattttgttatataaaagataaaaaagaccagtaattctgagacctgtagatactggcttgaattctggagtgtgagaagaagatgatgtggctttattatcaaagaataggcagtattttaaatggatgctcatttggtttttgtataagaaaacattacttttgttacaattattagtacatgagattattaaaaatccaaaatagattttaatccacctgacaataaacctaatagtggaagacttctctggtcttatggtgaatttctaaatgtattccaggtctgttgctaagataactgactctaatttagaatatacctgttaagtacctcctctaagttctgaccacaagaacagatcaaagaataagacagtctttgtcccttgaaggatatcttagtggttgtatttatcaattgtattaataaagcaatctttattattattattgctattctattttgaattgtataggaagatgctaacattttaattaacaatatatcatcttatgtggcagatgttttaaaattatataaaagtaattctcattttagctgtaattttagaaatttgttcaaaggaataattgtatttgatacatttttaataaaaatcactatacttggaaaaattttacctctgtcactccatgacttgtgtgcattcaatctttctattgtaacttgtaggaagtttttgtttttgaaacgtagtttcactcttgttacccacgttggagtacaattggtgagatctcagctcactgaacctcccccttgggttcaagcgattctcctgcctcagcctctctagtagctgggattacaggtgcctgccaccacatccggctaattttttctatttttagtagagacggggtttcaccatgttggccaggttggtctcgaactccttacctcaggtgattcatccaccttggcctcccaaagtgttgggattacaggcgtgagccactgcgcccggccaacttgtaggaagttagtgtgaaatggcaagttagtctataggatatttggggtttgtttgtttttttttttttttttttttttcgagacggagtctcgctcttgttgcccaggctggagtgcagtggcatgatatcagctcactgcaacctccgccgcctgggttcaagcaattcttctgcctcagcctcctgagcagctgggattacaggcacgtatcaccacaccaggctactttttgtacttttagtagagacagggttttgccatgttggccaggctggtcttgaactcctgacctcaggtgatctacctgcctcggccttccaaagtgctgggattacaggcatgagccaccatgcccagcctataggatatttgtatatgaatctgtatgtgaagttcatattgtcattattgaattttaaagtttaaatagatcaaattttttgtagatgttaattttttttcctggtgtttggggacatatgacattagatctgaaagataacttcaaaactatataacaggccaaatattttgattccttgtaaggaacccaaaaaccagatgaattatttgtttaagttcataatgcaaatacagtggcaaagtcacaatgaaaacccaactaattttgtgcagcgttataggggtgttctatagtgatacaacttggcctttgcatcacattatcagttcaaatcctagcttagctcgttagctaccttcttgctagaaaaggcaagactttcaaaattagttaatactttctcttctagcagctattgatgttcaacaaatttcattaacctgtaaatgccccttggagttgtggccatactgttttattcattttttaagtatttacagtagaattgtcatttcagttactataagctgagtaactggacagcttctaagattacatttttttaatacacagaaaattcaggtaatttaaaaactgctttagattcatcttgaaatatatatttgctctggaatgaccatattgcagcatgattctcatgaacttcaaaatactttatttaaaaaacaacttgaggcagcaaaagtattatagttgtctgactttatccgtgtgatgtgcagggcctccttgtcttctgatctcagtaaacttacactgattgtttcagatcagaagagcagaaacggcttagttctaaagagactgtttggaaaacatttccaaataactgcagcacttggatgactacttccctgagttttgcttattcactgaaagcagaactactgtgccgagccctccagtgacatgggccttctgctctcccagacatttgcctctcttcacacctgttctgaatccagcatggagcagacgagaagtcatggagttctgacagttccagcacgtgtgtcccctttgcaaaggggaaaattacgttttgtaagagaccccaaatcagggtctcttataaaccctggggtaaaactattagaaatgatattatttttcatttatttaaaaaaaccacagcaaataaaatctgttagagttaaatatctgtgacgccctcctaaatcatctgtttcatttcagtaaatatttctaagatataatattctgttgacatagattgccccttgtgtttcatgtaacacagattgtatctttcttcaagctttttgtttcctcctcttctctgaagttttaaaaccagttttaactggcttacagtgtgtgtgtgtctgtgtgtgcatgcgtgtacatgcatgcatttgcactttcctttgttttgattttatcaccacctggcctttccatcaagttgcctggtgcttaagtaccacagttcatttgggcttagctttctgcctatatatgagactaacataaaaatagatttgttttctgtattcttgtggacatgagtgtatggtcttagggaaggtcattcaaaatgatttagtttataaaaataaatgtttatttactcatttgtttgagaggtatgaaccaaagtacacatatataaaaaggttatggattttaatattttaatgtattagattaaagatgaggctaatactgttgcttgaggatgataatttgacaatttacagtggcataaaggagaaagaatttattggtacttgtaattgagaatactgagttcaaacatggggtaaatccagggactgtaacaatgtcattaggaatatcactttattctgtttattcttttacctttttttttttctcacaaactttccttaggactatccataatgataatcagtaggtttctctaaccggtttaaccaccccagggggaaaattttcctaattttctaatagcttcaaacaaagttgatagcttcaataaaattaggattaagtctctggcttagcttgggtaatatgtgctgaaccagtcactgtggcctgaatgatagaatgctctgagcaagtcagggtcatatgttcacttactactgaagtgagtgatgcagttaggattgagatcagctctgtagtaatgacatgaactaaaagtaagagtgatagaagtttctccaaaagaaaataaggactctttagttactaggaatgagataaaaacaagaatattcacaatagtatagaaacataataataaaaatgtgttatttaatgattgatacaatactagattctctgtgggccttacttaagtggctttcaaatgtttttgcatattaaaatcacttgggaaggttttaaatatctcagtgtcctggctgcacaccaggccagttaaatcagaatttcgttagtacctaagcctgtgtaatttgttttgaagttccttaggaaaatcatgctaacaagaactaggtagacagatctggtagagtcaaggttcaaaaagagggatttcaggggacagagaagttcacatgggagaagcaggatccaatggagagaacagaggggcctcaaagagagagagaaagaaggacctccagcctaggaggtacctatcaaaagaagcgtgggactccaatctagtttcagagagtacactcaaaatcttaagtatcagaattcttgccagcttcagtgtatgttcagtggttcaggaatctgactcaccagtggatccccattaatcagtcagacgtgaattcaaaggtgcaaacatagggtcctgggtccagtgatgaatctgattctgagtcacagcaccataactgttaaagaaaaaattactcagtgatacttgttaaagcatgataaggctgactttcttcagaatcattgagatataggtataggggccacagctgtgggattttggaattggagaagagagactgggcccaactccaaatacagcatgggcaagtgggaatgtatacccaaggagcagggtcggggttggcggatggaaaattaagagtaacatcaaagtaaggggtttctgggtaaaacaacctaatgattcttgctgaagatggccagagtaatcagagtaattaatttggggaatggtgaaggataaggaacctgatcagatatcaagggtggggatactcttgctaaactgactcagtagggttcttgctaaaactggtttttacaagagagagcacaggtaggtctacaagaagattcgggagactgactaaagtttcatcaagaatctttgtcaggagacatgacctttatgatacttaagtttttctttttatgcggttttgttttaaacaggctaatagctcgtcagcttgctaaaatccatgctattcatgcacacaatggctggatccccaaatctaatctttggctaaagatgggaaagtatttctctctcattcccacaggatttgcagatgaagacattaataaaaggtaaaattatttttacatttgaaattatgttttacattgctttgctctatgatagggtttcaaaggtaattgtaaagtttcattgtataaaatctggttttctttctttgcattgaagtaaagtaagcattgattctttggctgtcagatagcactacagaaataactgcctctccatccccctcagtgtcccctcccaaaaaatatgccctacaacagcaaggggcagaggtggaagtaggggaacaccacttaaaaataaagaggtaggtggtaatggtgaagcaagatttttcttgactttttaagatactgcagggttgagaggcaagtctagtattatatagaataagagcacaagagcctggagccaaactgagattaaatcttagtcctgctagttaacatttctgttgtgtaactcattcaactagggaacttaacctaactgtttccttatctataaaatggaaattacagtagtagtatattaaccatatagagtttttgtgaggattgagatagtatatgtaaagttctttaaaacagtgcctggtcatcacttaagtgttgaggtagctgctgttttaaaaattactattgttattcaaagaaggttatttgagttatattttttccctaggctctccaaggtatactttaaatccttgaggttaatgattctttggaaaagctggaggtgtgctgtggtaaataataggaagaaaacccttgccccaatagaaaataatacaactagaacataaaacacaattaaaatattaaatacattttgtatttcttttattccattttgtttgttcatgatttaagttttataatccttcgaatcccacaattttcattcgacactacctttaaaaaaaaaaaaaaaaaaaaacaccgcagttttgaccagtcataccattttgaaaagagcattatgaggattacttgtggaagttgtatgtagagaagaatacagtagtggagaaaatataggtagaaaccacctgaacaggcaaattaagtaatgtaaaaagaatctgtattatactgttaatggagaagcagggagtaatttgagagactttggagaaagaatcaagaggtcatgacttaaagtattaagggaaggagtgaaggagtatagccgttttgtaagcctgattggtgctattgaggaattagtggtagtagcccaattttgtttccttgattttttaatcaaattaatacaagtatagataataatcagtatagatgaggataggacaaaaagtcgcgatttctagtccagcttaccatgttgcctcccacccttcacagtctcactactctgtggcaatttctataatagttctgtttttaacataactggattatataaggataactttattttttatcaactgtagacagtaatcttttgacttttctgagaatttagatttatattgcattcaccctttcaaccttgaaatatgtatttttaatttttaaaataatttttgtaactttaaataatatacttaaacctctatttattaaatgctttgtgtcttagttttgtcatctataaaattgacataaatgtaaattacttagaatagtacttagtaattgttaactattacctatatatattacttagaaacccaagtttttagtgagttttttaacttttgtcctacattttaattgctgctcagtttcttctattcatgtctaaacttactatataggttttctttattctaacttttgaaatagaataattggtctgttgtttgaattcagcagtatgtgcgattaaattgaagggatttattcaaaatagattttaatccttaatcaaacttgaaaaaaatgtcacacaagatataactcttcttttaaaactaaaaggttcctaagtgatatcccaagctctcagattctccaggaagagatgacttggatgaaggagattctttccaacctgggctcacctgttgtgctttgccataatgacctattgtgtaagaatataatctacaatgagaaacaaggtaggtatttgaccttagcagtaagtaaaattgatttcttttatgttcttaatggtcattttatctctatatcaacaaaataaattcaaatgcaaggagtaagagcgtgcatgaaacctttaaagattttcttttagtttatcaagttatggtaactgtgaaatttaggatatatattctttttatatttgtataaaatatgttttttagaattggttagaaacagtttgtgatttccatgggatttttaggtataaaatgatgaaatgatttgtttataaatttaattgcaaaacttatttggttattcatgagttgaacatgtacctgcttgtaatgggggatgtggaaaatcaacatattgacattaaactgctttataaatagaaaaattttctcacagtgttgggaaggacaacagtattaaaaacaaatgtgtctccaggtttctcattatctagttattgttgatttgttagatattttgatactaaggagagagctacagatggaggagatattatttgtagttgctcaaatttatatctactaaagtaatcaagaaaccttggtagataatttcaacattttttgaggtagactgatactttttggtgaaatgtttttgtgtttatatttgtacactgtattcaatttctgttttcatatttaagaaccactcggttgtattatattactgggtgaagtggtttgaggtttggttgctaaatgatagatgcccttcaatgctaaattgaaatttaaaaataaaattttggttgaaggagtcttactaacttaaaaaatgtttttgaaactgttttcattttataggaaactagttccccgcaccccccccctttttttttccttttttgagatggagtttcactcttgtcacccaggctggagtgcaatggcataatctcagctcactgtaacttccgcctcccaagttcaagtgattctcctgcctcagcctcctgaatagttgggattacaggtgcacatcaccatgcccggctaatttttggatttttttttttttttttttttttttagaagagatagagtttcaccatgttggccaggctggtctcgaactcctgaccccaggtgatccgcccacctcggcctcccaaagcgctgggattacaggtgtgagccactgagcctggcctttcctttttttttttttttttaagtgactggatctcagtatgtcacccaggcctggaatgcagtggtgtaatcatggctcactgcagccttcaactcttgggctcaagcagtcctcctgccccagtcccctgagtagctgggactacaggtacatgccatcatacctgactaatttcaaaatttgtttttgtggagatggaatcttgctctgttgcccaggctggttttgaatttgtggcctcaagtgatcctcctgccttggcctcctaaagtgctgggattactggcgtgagccactgtgcctggcctggaaaccagtttttgaagatagttattacagttggaagagctgattttgaatcaaaattgtgctgttgtaaatatagtaaagcctaagaattcacattagcatggtcataattatattaaattactgtttatgacccttcttagagtgtaaagcgggactattcaaatacaaaggttgatagatatagctgactttcactttaagaaaaccaaaggtacactgtcaagagtggtaggcttaagcacatattgccaaaaatatatttgagaattttttgtttgatatttcaatgttgattagagattctatttttcaaaaacatactgagctaacatttttgttttgaatcatcttgaaatgcttgtgtggaatcatttttaaaatttcgagcataccctaaaacattaagtacttgacagtgtcctttaatgtcttattgtctgttatatataattatcatagtacgtatgcactacattatatactggtaaccaaatctcaatgccatttgtgagactagagcattagttacgcattaaagcagtgtatgagcttgtaaattcagtgcaggacctaataacacattttatataatggaatttcaagtgagggacttcatcttacatttgaagtggacactcagctttatttttaactgcaagttgatcaaagagaatctgttatttcctttagaatataattttaaactttcatatttttatttttgtaagtttcttttgcatattcatttcacagaacaaaacttgtttataaaaccaaaaaataagggaccaaaaaaatcagattactttgtcttgggtgttaaaaaatacattttcacttttttatttaagtggtcacttatctctaaactattgatcagttatgtgaaaagttcccatgttttcacataaaatctttattcagtttggctttaagaatgcaaggttgtcatttgtttttgtgccaagttacttgaattatacttttgtgtctaattttcctttcacagaaaaattttacagctgtacagatgaactattttgatacattttttagaatttgccttttttattgaagtctagtttgtatcatttgttttttctttgtctttgtggttatgtatgtgtcttagttacagaaatgttctgttttttttttctctctccttacgtggttttataatgttcattaggaaggctggttttgatcccatagtatccgtttaaaagagtaatttctatgtgattacttcaaacataagcattaagaaatatggttagaatgttcaaataaaaatctaaaactaaagtatgacaagaagcttacttaacctagtctttagtgttacgtttcaaattgggagctaatggttttaaggtaatttaactatatgacatgtttgagtgtttactataagtagaagatgccatgccttatacttaaaaagtatgaattatattatttaataaatttaatagtcaaaaatagtcaatattgagtaaatgtaatatgcaaactagttatatgtttgcatttaatatgcaaataatataatatgcatataatataactagtaggtatgtttgcatattaaatgcaagcatctaactagtagatataggacttaattaacagatatgacatgacgattcagttcactaaaagtggaacttttagtttctatcttaactataacttgagagattaatttagattaatttagaattaaaatgtgtatgtatatgggtatatgtataagtaacatatttatacacaaggcacacatactatgagcaccctgcaatttgtaggcatttttacatgtgaatgttattggaactggtagacatcacaggaagaaattttatatatttgagattgtagcatagcattaacacttatggcagcaattttgaaaaggttaattaaagatacagactgcagttatttaccttctttagttgccttattatagcatataaatgccatgttgagtcttttgagattaagataatttccatatagaataaatgattaagctgcatattcacaaacatgtttgattttttattacttcttaagtcattcatatgacttgagctccaggtttcattattgtgtacccaactttgagataccaatagataaaacgtaataagatgaaagccaggggactggccttggaatcatcaagctcagtatttgtctgcagtatgtttcagacccttaatttctcagaagtacaaattttaggcaaacttcttaaatttatactggattatcttgatgtctctacatatatgtttaaaccatagtaacttagattttgtactagaaaatctctaactcttaaaagcagatatatttatagcttagttactatcaagagaagtcagaaagagtatagattttggaactaaacacattcgagtttagatccctacccagttacttacagaaataagtagtattagacatatcgttttatctctttatgtctttatgtaaacacagactgttcttgacagtttacatcagaatcacctatggtacttgggaaaaaatttggatttcttggccccacccatgaccaattacaaaataatttttatagataggcttagaaattttatgtttaacagattctgaggcagtttttgtactattgatagtctagaactttagtttgctttatttgtaacttagagacaatatctacttcagatggatgctgacaagattttagatcatgcatataaaatatatagcactggaccaaggacttagcagctcttagttgtagctattatactaacataggggttggcaaacattttctgtaaggggctatgtagtacaacttttaggcattgtgggctggatagtctccattgcaacatttcagctgtgtgttgaggcatgaacacagccatagacaatacatgagtgagctgtgttcaaataaaactttatttccaaaaataggtggtggattggatttgagctgaaggtacatggtttgccaaccctgtattatgtttatagcatttgttttacaaaatatacctgattctgaaaaaatgaaaaatggttactataggctagatagtaggtagttaagtcctataactactagtaggtagttataggacttaattaacagatagatatgatgtgacaattcagtttaagtgcaactttcagtttctatcttaactataacttgagagattaatttagaattacaaatgtgtgtatatatatatatgagcatatgtatacataacatatttacacacaaggcacacatactatgagcaccctgcagtttgtaggcatttttacatgcgaatgttattggaacagataggcatcacgggaagaaattttgcctctacctgctctcaccatgtcagttgacaggactcaggacatgggagaagagtgagcttcctttctgaagttgatggtagctgtcaagatttttgaaaagttagtgccaggaattaggtgattggtaagcagcggcccattccttgccttcagtgaaatgacatcctgaaaaggtaagaaaagaatacttaatgatatggtgatagaatttgatatataataaggaaaccaaaagcagcagttcttgctccagaactataggaattatcagtcatcttttaaatcaatcattaatttaatagactttatattaagcagaataaattgtaatattgcttatgactaacttcaaatctaatattttaatttcaactaatcatttaactactgacatcaagaaattactaaagctgttgagatttctatctcatgtcttgatgttctctcagaatgtttattggtctcatgacttttggtgactttcatttctcctgctgtccccatttcttcataaaagctcatgtaaatacctaatatttaactttaaatttcagtaatggcaatcactgtttattttctctgtcagcacaatacaagaagctgatttacagctgtttaaggaaatacaaatgagtggaagaaaaggaaagctttttctgggaattaaagagtaaatcaggttttgttttattttgctttgttttaagagttctatacaatataaatagaaaatgggtgagtccccatagtcacttgtttggctctaaatcttatccattctattattactcctgagaaagctttgtagttgtcatgttactcatgttttaatgactgagaagagttttttcattggtacttttaaaaaatttaaataaatacaaattgatttttgtgtttggtaaactatgttttctagggtggtgtttttaaatgtagtttaatttttaactctgttttaatttgtattctcaaccactagttagcagaaaataaaatatctgtaagtcagataataaaaaacttaaatgaactgtaaaaacctgaagttatgaagaaagagtgacctaatataggtactagtttgtttgttttttcattcattcattctggcccactgtgttcagtcttgtacttgaataaaaatgtcagaaacaccacacttttttctttagtttttcatgcttttttgtcttttcccctcccccagcaaacgtgttattgtgtgtcagcattttctgcaaacttcattttttctactagcatttaaatatttcctgtgtcctagggattgctctgtggattgcaggataaaagagggaagggaccctagtgcccctccaggaggctgtgtatcttgtagtggaggagtccaatcactgaacagatacttacatttagaatgatgagtgctctggtgaaggggtacagagtactacaggacaccagcgtgaagattaaagggaaagtgtttcagactagaatactccctgtctttttctgtataaaatagaaaacattttgctaacattagtaggattatagttacttttcgtatcgttctcttcgaacctgcctaacattgcagagcaagtagggtgagttggaaagatttttcaggttctcatattgactattttgcttttcatttttattcctttctcctaacaacaaaataaaggaattcagacaaacatgtcatgtgataattatatagccttgggtaatacattattattttttagttttaaagtactttaaaaattggcagagtatttttagtatactaagatttgaacagtttaaccagtagtgtcgggatttgattacgctgataaagatatgcaagaaataaagtaataaaagacaaaatgtaggtttggaaaattcaaattgtagttttatccattaatcatatactttactttgtgcttgtcattgtgataattacataaagataaataaaataacacacctagcccttaaagtagtagttctttactttttaaaggtcaggggtcccttgagaatctgaaaaattgagaatctcttcctaagaaagtgcacatacacataaaattttagggaatattctagttgtcttttcatccttgaaaccccaattaaaaattcatgtcttaaagaactgagatgatgatcatgctatatgagctagttaattattaatgctgatgtggatattcgtttaaataaagcgaaattttagaaatcagaagttaaatttatagaaggaaaaagtatattttctgttgttaggaaagcattttccagtaatttgatttttctggcaccctaactaagggaagttggctttttaaattttactttgttgcagaagattaaatttaaggttgagttccactttgtttgcaatagtttgaaaaagaatagttaatgcagattttttttttaaatttttttccttttaagctttgtgtcttgtacaatgtgagtttgccaaattttcttcatctgctacagattaggtatgccattgttgctgccatgtggcggcgcaccccgtgcttcttaaacgcactgactggaggtttatcgcatcacttgttcacatgcacggagcctggtaacagcctcatctgtatcttgttagcttcattttcttatttttaaaatttcattatttataaactcaacatagcatttaaaaataaaggctagttttaattaattaatgttactacaaaaagtcattgctaaaattttcatagtgaaacagattttaacttttgttaaaatgtgctatgctttaattaaattgtatttactctacaagcagggatgttttacctgccattttaactgtatttgccaaattctaaatataattttgaaaattgaaattgaagcttatgtttatgtggcaaaagtaagcttcaggactgggctgtgtatttttattggcatgtaacagttaatatgagctctacaagaatttgtttttaaggagctaaagctatcaacagctgcagatttaaaaaattatatattaaaactgttaggttagctcagttgtacaacttagtgaatcttgtatcctgagtttctgaaggctggtggataggtatctctgaaatcattgtgttttagtctttttactgatagttttgtatagggaattcatcttctcttttaaaataacttttttcctttaatttatttctattacttattgtacataaattttaaaataaaaaaataaaagaaaaaagtcacttgtctatcacctgttaatagtttaaacattttggtttatttccattcatccttcccccccatgcattatttacatatttttttttctctgtaggcatattttaatttggatcacagtttactacttagtatctccttttcatgacatttgtaatttccctggtcattatttttgaaaatgagatttcttcatggttttatttcattttattttcatgcctgtgagtattttatcatgatggttgtcttcactctcctactcccaatgattcctagaaaagaaactttaaaacatgtttctacttcccattctgcagtttagtaaaatgatttggttaactcttaaaactttttgtggaataatgttctgtgaattcaagtatacaaggcaggaggatcacttcaggccaggagttccataccagcttgggcaacatagcaagaccccgtctctacaaaaaacaaaaagagaaaaaaaatatataatacttgaggtagttgaattgccgtgatttattgtcaccaatatttttaaatcttatatttattataataatacacattacatttttataactgggttataacattgattattctcacttattctagatgtgacttatttaaataagtttagaattatatattaaatacaattatattaaaaacatttttgcttttatgtaaaacactatttgccatgacattttttgtcacgtaattttgtttttctttgtgtttgaatatgatcaaatacttcccaaaattaaacttacaaatgtatatcaacatattataattcaaaagctgtttttatttgggaaataaataacaatgtgtaaagaccgggaatttgttctcctacctaagcctgatgattaaaagacagtgtaactatgcaggtgttaaacattttctatattcttacagccatctctgttcatatatccatttttaactccacgcccctgtaagcctttgagtttgtgatccctggtgaagacagtgacccacattgattttttttttttttaaggtttctctctctcttttttgctttttctctcgaatataggacctatatctttgttaaggcaaatcctttataatattcattactcaaaagttaaaagttcctgagtagtagtatgaaagaactagattatctttggagagttataatgacatgcctatatatgtagcagtaatttagaataggcatctatttagcttatgtgaaaatttctcacgtttataaacgttaaaagaaaccatacttttgctttttgtaagataaaaccaccaccttattgcaccgtaatgctgctcagatatggaaaccttggttaggtagtattacaggaaaatgtaagcatatgatagcaactaacttcttgttagtgatcttacattgctcagcaagtatagcattattgcaagatttacagaattcaggtctttaaaagtttatattttatttccatatgtagataagcttgtcagtttactgttggagtatcataaagtttttgttaaaattacacagattattagtaatttccaaagataaaaattatgtttctaattaaacttgaatttttaagtaactgatgcccccatgtggcaaaggatttattttgcttttgcttaaacttggagaatgactgtcttttcatttttctttaaaaaagtggacattagtgtttataaagaagctgttgaccaagagacataatttgaattttgtaaagctcattgccataaaattcacagccccttaccctgtattgtctcacaagtgcatgtaatcaagcacgtacaatgagacaaaatattggaagctatttaattacaaatagcatagggattttctgatcttatatgtgatttcttaatgtctttgtttttgtgtctcacataggtgatgtacagttcattgattatgaatattctggatacaactacctggcatatgatattggaaatcatttcaatgaatttgcaggtataactaatggagtaacttatttagctttgaaacgatattttcagaatatttcattctttttttaaagtagataaaccgtgagcagggggaacattttcccacgtgttgttgaccgtttttctttgcttttgtttatcactggaagaaagcagagatgaccaaaatttcttccttaattgctatcagaaagtaataggtggccgggcgcggtggctcacgcctgtaatcccagcactttgggaggccgaggtgggcggatcacgaggtcaggagattgagaccatcctggctaacacggtgaaaccccgtttctactaaaaatacaaaaaatttagccgggcgtggtggtgggcgcctgtagtcccagctacttgggaggctgaggcaggagaatggcgtgaacccgggaggcagagtttgcagtgagccgagatcgcgctactgcactccagcctgggcgatagagcaagactccatctcattaaaaaaaaaaaaaaaaaaaaaagtaatagataggagaaaaataatgattgtggcttctgttgagatcagacatagcataaggtgcttcataaatcttacctcatttttttctccacagcagccctacaaggtaatactcgcagtttacatatcaagaaagaaactcaccaaggtcacagtaaaatacagagaactaagatttgaagctaatttttaagcatttaaaaagcctttgctgtttccattgtaaactggggcttttggaatattagttcactaaaaagttcaataaccttttttgactttgtctatgaatattgaaaagttggtcatttttacccctattaatttataattacttaagttaaaattactagttttttaaatgtaagtgggaagaatttaaaatccattttatcactctttatttagaaacacgaaatgctctaaaaactaaagattagaacataccccagaatggtttatacctagtaggaattttttattgttgaatttatatttgtgtaagtttatatatttatatatttttatatacttcagattaccagactgggaaatactctgggaaaaaattttaatttgatgtttccagttattttggactaccaagcttatcatatacatataagctgtacatatttttacgtatctcatctatggaaggggaactagctgtgcatataataaaatattaacatgttagtaatatagacggccactgccgtggatatgaaatagaaaactccagtgatcttctaatgattttgtggacaaaaaaagtgagctaaaccttgtgagttaggtagaatttggatgtgcaaactaaagagaaggaaaggggaaaaaactttaagatgaactacttacttttataggatatagaattcatgaaggagactacagagttataggactagtgaggtagatttagaccaacttctaaagaaccttggatggcaagatagtatgaactttgtcttctaggttagtattttccaaactatagatcatgaagttaaatttgtggggtaatgacttttttgtttgcaaggaatggaaaagagaaacaaaatctcagagttggaaaatgttgttgggataaatactgttttgtgaaatgtagtatcagctggttctatgtataaggtctcaaaaaaaatgtattcttggttgcagtgagccgaaatcatgccactgcactccagcctgggtgactgaacgagattccgtctccaaaaaaaaaagtattcttaccatgagtcatggtttgaaaagttttatagccacactttgaggtagtgctccaaatgtcagcatgcttaagaatttcctgggttgcttcctaaaatgcatagtttgggtttgtgatgcagctggttcaagctataaactttgaggaaaaattgaagctatgagaattgatttggtgatcaacagtaatgtgccttagtgtttaagctgaaatacagaatgattggtttattattttaataaatgctttttacttaacatgcagtattccagccaaaatggaacttttcattttttatgaaaaaatggtggttttagggattattaaggtatgcagaagagtttatgttttaaaatttttgagtgtagttttttttcttctaaaggtgtgagtgatgtagactatagtctgtatccagatagagaactacagagtcagtggctgcgtgcttaccttgaagcctacaaagaatttaagggctttgggactgaagttactgaaaaggaggtagaaatactcttcattcaagtcaatcagtttgcattggtaagtttaaatgtacacaattaatgaaaggttcttactgtaattgaaaatgcttctaaattttcgtcatcttagacaatttcctattttaagttttgtgaatttttgttcaaaataatgtaaatacatgaccatttacagtatgcattaccccattgcattagttttaaggacaaaaattttgtttcatttcctgctatatccccatcccctagaacaatgcctggccatatgataggtactcagtaattatttgtttaatgagtagattcttatcagggttaagattgatgcataaaacaatttcttagtctattcctttctttacatcaaagtcaaattttacaggagaggagcttttccacaacacattttatggttagatcttatgtgataaaagtaggttggaagaacctgtaggattatgttttttatgacttatccagtgttttgtcttcttgaccttcatttgataagcagttatttccagctttattggtgtcttaaagctttattattaagacctacttctctttacatgcatttatattttaaaaatgagctcattatcttttgagaataatatgatacattagaatgatctttcaactaaggtgttagataattaaatggaataataagccaaagctattttagctgctgctttttggttttaatataattttgtatagttgacatgggaaatatttgttgtgttgtctctacagatagaccctagtggtatatgggtatgccatttttatagtcttaaaagtaccatatgcccagagttactcagaatacatcccaagtaagaaggtgtcctgaaatgttcctttacctgctgttcttctatctattttcagtacagttactggttcaattaatgacatgctctacagctggtcctaggatgcctgcttttctatttattgtatttaagcatgatcttagagaatgtagggttttctttctcattaggtgatttaatgaatttcagattcagcctaatattccatttatgcattgaattagttaatttccaggtaaagtacacatagctcatcaattcttaaccatcaatcccactgtttgctattagaaagctgatttggatttccttgcaaacttttgatgacatttaagatttttgggggatactgtgactgtatctgtacatggcattgaaaaatacctttgcttctgatttgatcaattgtttataaatattcatcaatcagatactaagtacttactgttattctaggtcagtagattggaagaataaaaaaaatgcactctttcaaaatgcttataatttagaaggccaaataagatgtacagaataactcttttggtggtaaaagttaacactcatttcttttgaaattgattttattttaatatttacttttatttttattttgagacagtctttgctttgtcatccaggcctggagtatagtgatgtgatcacagctcattgcagcctcaacctcccgggcttaagcagtcctcccacttgagccttctgagtagcaagcgccaccatgcctggctaatttttttaatttttctgtggagatgaggtctctctatattgcccaggctggtcttgaactcctgggcctaagtgattcttcccggctcagcctcccaaagtgctgggaatttataggtatgagccatcatgccagacctatttttttattagatacaaggtcttgctctgtcacgcaggctggaatgcagtggtacgatcatagctcactgcagcctcaaactcctgagcacaaggggttctcccaactcagcctcccaagtagctaggactacaggcgcatgccaccatgcctggctgattttttaaaactttttggagagacaaggtcttgctatgttgctcaggctggtcttggactcctggcctcaagcagttctccagcctcagcctcccagggtattgggactacaggcataagccctatacccagccataacacccgttttgctgtaaaattattggtaaattggaattagaaggaaacttacttactctgattcaaaatgaaaaagaatatcttcatgaaatgaacaacagatatattaataaatgtcatacattcagtagaaggtctgattaaaaaaagataaaggacaattgatagacataaaacttcagtacctttttaataacatttctgaataatttaatatgtcctctgaacttacatatactaagtttttccatagggcatatagtaagtgttatactctgagattctgataccaatttctagttcttcctcattaagaaacattaaaagcccgttatttatttcaattaaaaaaattttttattattatactttaagttctggggtacatgtgcagaacctgcaggtttgttacataggtatacatgtgccatggtggtttgctgcacccatcaacctgtcatgcacattaggtatttcttctaatgctgtcccttccctagccccctacccactgacaggccccggtgtgtgatgttcccctccctgtgtccatgtgctctcattattcaactcccacttatgagtgagaaaatgtggtgtttggttttctgtcctgtgttagtttgctgagaatgatggtttccagcttcatccatgttcctgcaaaggacatgaactcatcgtttttgatggctgtttagtattccatggtgtatatgtgccacattttctttatccaatctatcattgatgggcatttgggttggttccaggtctttgctattgtgaatagtgcctcagtaaacatacgtgtgcatgtgtctttatagtagaatgatttataatcctttgggtatatacccagtaatgggattcctgggtcaaatggtatttctggttgtggattcttgaggaattgccacactgtcttccacaatggttgaactaatttacactcccaccaagagtataaaagcgtttctgtttctccacatcctctccggcatctattgtttcctgactttttaatgatcaccattctaactggcgtgaaatggtatctatctcattgtggttttgatttgcatttctctaatgactagtgatgatgagctttttttcatatgtttgttgaccgtataaatgtcttcttttgagaagtgtctgttcatatcctttgcctacgttttgatgggttttttttttcttgtaaatttgtttaagttttttgtagattctggatattagccctttgtcacatggatggattgcaaaaattttctcccattctgtgggttgcctgttcactctgacgatagtttcttttgctgtgcagaagctctttagtttaattagatcccatttgtatactttggctttggttgccattgcttttggtgtttgtagtcatgaagtctttgcccatgcctgtgtcctgaatggtattgcctaggttttcttctagggtttttatggttttaggtcttatgtttaagtctttaatccatcttgagttaatttttgtatgaggtgtaaggaaggggtccagtttcagttttctgcatatggctagccagttttcccaacaccatttattaaagagggaattttttccccattgcttgtttttctcagatttgtcaaagatcagatggttgtagatgtgtggtgttatttctgagacctctgttctgttccattgatctatatatctgttttggtaccagtaccatgctgttttgattactgtagccttgtagtatagtttgaagtcaggtagcatgatgcctccagctttgttctttttgcttaggattgtcttggctatgcagggtcttttttggttccatatgaaatttaaagtagttttctgtaattctgtgaagaaagtcaatggaagcttgatgggaatagcattgaatctgtaagttactttgggcagtattgccattttcacaatatttattcttcgtatctatgagcatggaatgtttttccatttgtgcatgtcctcttatttccttgatcagtggttttgtagttctccttgaagaggtctttcacatcccttgtacgttgtattcctgggcatttaattctcttcgcagcaattgtgaatgggagttcactcatgatttggctctctgtttgtctgttattggtgtatgggaatgcttgtgatttttgtaaattgatttttttttcctgagactttgctgaagttgcttttcagcttaaggagattttgaaaagccctttatttatcaagtcagtttttgtttcgattcctgttcttattttatcagaatttgctgatcgtctgttgtgtgcttttcctgcccttctgggatgtcacaactttcttgcatcagggcctctgttgctatcttcttttgacatatcttcttttcttttccaagactttctatatcttctttttagctagccgtttaccttcctctcttaccaactcttaatttcctccgactgtttattaagtatgtgcctctcgcatctcaagcatttgaatgaatcaataattgtgattgcaatgtgaaataaaaggaaaccctgaatcttactcctttatccttcatgcgtttctcagacactgcaatctgccttttccctcactgctgtaaaaagaaaatcaggtaaggcttaccaatcatgacataattgccaagtccaatgtaaatttttcagtccttatcttacttgatctgtcagtagcatttgacagtatttaccattgatttaaaaaatgttctcttgttgacttttgtgatagttttatgtatggtgaaaataaggaaatgatcaaagtctggtttcatgaattacacactttattgccatacaaagatagttttttccccttaggttcacaatgcttaaagagaggaagaacaacctgaacaaatctcacagggaatatactcaatagatgaggtacattaactatataatgagtgagttccaaattgttaaaagtctagtccaattcggatgaaagcaggagaggattgagctttttacgattagtttcttgggcttgaccaacataggagagatccatgaagacacttgaagttcctggacacaagaagttggacgttaatgttgtcatgacaagacttcaaagctccaaggcctgtagaggcctgaactctgcttttggagaagtaactgacagagtgtagcctgtcacagactaagtgttcagaatgtcaaactgttatgtttatatgtattttgaagtccactagttaaggtcagttactcacatggggtctgagaaagtgtaatgtaacattcccaagaggggaaggagttcaccccaagtactcacatatggagtttgtattggcattctccagagggacagaactaatgggatatatgtataagtggaaggaagtttattagggagaattggctcacctgatcacaagttgaagtctcacagtaggccgtctgcacgctgaggaagaaagaagccagtagtggcgcagtacaagtttgaaagtctcaaaaccagaagagccgacagtgctgccttcagtctgtggccaaaggcccaagagccccctggcaaaccactggcgtttaagtccaagtgtccaaatgctgaagaacttggattctgaagtccaagggcaggaggaagcatccaacatggggaaaaagaaggaagccagaaaacccagcaagcaaagttatcctaccttcttctgcctgctttgtttttgccgtgctggcagccaattggatgataccagccgacattgagggtgggtcttcctctcccagtccacagactcaaatgtcagtctcctctggcaacaccctcacagacacacccagaaacaatactttcctagccaactaggcaaccctcgatccaatcaagttgacacctaacattaaccatcatagggtccgataagacttcgcattctcctagggagtgggagtagttgcattttacatatgcgatctgatagttctcatattcgtgttttttgttcttggttttttgttttttttttttttttgatatggagtctcactctatcgcccagccttgagtgcagtggcacaatcttggctcactgcaacctctgcctcctggattcaagcagttctctggcctcagtagctaggagtacaggcgtttgccgccacacccagctaatttttgtatttttggtaaagacggggtttcaccatatcggctaggctggtttcgaactcctgacctcaaatgatccacccacctcggcctccccgagtgttgggattacaggtgtgagccacctcacctggccatattcttgaagggtggaggaatacatacatcattttaaagctgtgtgacaaattctctttttgtactgtcttgctcagtctcttaatctggctcctctttcctcctcttctcccagccctcttacatgttaacagtattccctagtgttctgatttgggtctaccccttccaagttctgttcttggttcctaaaatgttcttgatttcagcaccttctccttttattttttacctttgattgaggactgaatctcttgccaacattagcctttactggtctctttgccttcagttttttttgttgttgttttgtttttcctgtctttcatttattctgtatattaaaaaagtgatcctttctagtaattagaatttaattaattagattgtgtcacttttctattttatggctccctgtgacctacagaatgaaatccaaatgacagcatctgcaaactcttatttcccactacttcacacgtcctacttctgctctagcagagtcattttgtgcgggcatactccatgatgttgcatgtctgtgtacttagaagcttattccttctacctggaatgccttttaccctgcatctcttggcagatttctcttattccttatggatgtgtcttaagtgctgtttcctccttagatagtttatgaagctgctttgataaaaagaaaagcaggtctgaatgataagatcagggtatacatgttttgaaatagtataaatggttagtaaatgttgattgctcaggccatgatacagacttctaaagattataacatttcacttgtcattgattgtttaatgttgagatggtggcaaacaaaagtaggtatatgggttataaaaccaaacagagtatacgtaatggctttgtggagcttttcttcccccctcccccccctccattatatgcacactggggatttattttagttatttatttaccatataaagctttgaatatttctttgcaacaggggtaagtagtctagaaattaaaataccctttaacagagagacttacatatccataacttccaaatgtgaaagagatagtatagttacagaatttattatttttttggatgtacttgtattttggggggatgcaaatgatgaatgggctgttttctgcctttgtttctcatccatttagaatctactgttatatattaatttatcacttttccccctataaaaatggttgcctacacaaatgagatttcagtgaggttttatggataatgcttctctagtgtagaatcgtttagttaatttatataagtatatgaataaaaactgattgagaaatatagttaccatctctgcttgacaatggtgagaagagctaagttggtatgtttttaaaatgcagaatgactcttgatttctcagtcttttccactacagagcaaatttagtaggaagaagagattaggataccatctataggtgattttatatcagcgtaaaatatgcaaggcaatttagactagtggttctcaaatttttcaatcttaggaccccttcatacttaaaatgtttttgaagacctctacaagcttttgtttttgtgaaataattaacagtatttaacatattagaagtcaaaattcaaacatttaagtatatatatatatttaaaataaactcattacattaacgcaaatgccataaatagaatactatttttcaaaacaaaaaacaatttagtgagaagactggcattattttacacttctgcaaatttctttaatgtctggtttaatggaatacagcaggattcccgtatctgcttctgcattacatcttttgtgatggattgtttcatttcaagtatatgaaaaaaagtttcacacatgcatgttggaaaagaggagtattttgccttttcagataattgtggatattcttttttgatactagaccaaagctcaacaagtgatagtttcttaaaggttagttgccatgaataatctgaatgtatcaattaattttttactctattacattaaaatctactggtttatcttgcagattgaatgattcttttacctgtatgtgattttgtaattttaacttattagttatttggaaaataattgattcattgagttgtatagatcttccaaatgttgacacatctcattataagatagctaaagatcacatatgttgatatcaccaccagtgtcatcagaaaaacttatagtactatattgagaagctgttaagctcacagaatcacataaaacttttctcatgttctaattttagggtgaaaacttgaattttatcattggcaacaaatattgtcagttattttcactgaaatggcaagttatcttttttatagttgagaaaatgtctgccaaatactcaagtctgataactctagtttgataactctagtttgtatattagtcatttttttcaagtaaaaattgtgtcccattaaaaatgtgcaaattcaactcaaaagtcagttacctaggtgtttttcctgagacatccattgtactttggatatgcagtagacgtgctttatatgtactgcctatttcctcccacagaatactagagcacgtactccagggtagagatttaataaaattaatagttttaatggcttcacaaaggacattctttagtgacattggctttttactgttattgtgtgatggtgaagaataagactattacactagtgtgatttgctaccactgccttgacttaaggtaacagtagtttcaccctcactgcttttgaaccattggtgcaaatgttaacatagtcaaaaaggcaagtaacatatcagtataattatgaaagtaattttgggcctccgaaaactcccatgggttcatcgaccactttaagaacctctgatgtagactttgaaaagaaggaagtcctctaatttcataatttcatttctcaatacctgatatacttttttagatagaagaccatttttgaaaatctttatcatttttaatcattctggtttcatatagtaagaatagctagcattctattgaatatttgttatatgccagctataggtactattatgacctacattttacagatgaggaaataaacgcaccacgtgaagtgcttaaagccacacgccagagcccagcttgtttttttaacttttatgcttcatgtgcaagtgactttagttgtttagtctttgctacattgtttattcttttctatctctatatcaggaaagaaattatattcctgttctttttttttttttaagagacagtgtctcactgtgttgcccaagctggagtgcagtggcatgctcctcactgcagccttgaactcctgagctctagtgatcaccagcctcctgaatagctgaatagttagtggtatttttttgaggaagccaaaaacaaagtgcagagtgctttttaaatagagatctttaggttgaaaaattttttttacatgtattatatcctttagtctttaaaacaatcctgtgtagaatacagaatggctaatattcccatctcgtaaatgatagatctgacactaaagtttgtgacttattaaaggttgcaaaggtactcagagatagagcctggactggaacctctacatcttgtaattcaaattaagaattctttttggtatactgtgctgcttggtatttttaaataccaaggtcatggctgttgaatacttttttgttagagcccctttgttactgttgctgtaatgaatttagctgaaacaaaaaccttgtctttaatactgtttctacttagaatatttctagttagaatatagtatttcttgggaagtgaaatcttgttcagattttaaaatattaccctgtttaactgaaaatagattgtaaagcacacataattattttacagttactaattacatgctaatttccctgtaagtccaaaacccatatttttcctgacataagttgtgttactttatgttgtggtctgttatgcagaattaaaccagtaagatcattttcagatgtttgtcacccctagaacatttttcacatttaaatatatttattgcttgtgagatttggattttcttttgtgtttatatttgtatgtcaagaaacaaaggcctttgatataataatgtgtaagcctgttagcaattataaccattaaaaacactaacatctatcagtgctgatggtaaactttgctttataaaaaagcacatcacaggaactggcctctatttttcaagtgattataatttaccataatctcctttggtgttgacgaaagtgatctgtagccatctagtgggtgcagacgtcagtaggatctaggttttagacgctttatataaaaagaacagcaagaaagtgtggtgcatggagttgatttagaggatagaattagcaattcatatgtgttttacagagaaattcattatcataatttttgatttttctttccttcttttaaggcttctcatttcttttggggattgtgggctttgattcaagccaaatactccactattgagtttgatttccttgggtaagttaaattttattatatgattacattggtctctgcttttgtttggattaacattaagaattcacagggaatattgtagttatttgcaatcaattataaaagttgtatacacttagtaattggtctgtgaagaaattgctataagctgttaagtgctcgcaggattagaaaagtgtccagtaggtggtgcaataaactaaaaatatgtcctttgaaaatcttaaactttaagaaaaccagcttagaggactgagtgaaaataagggaaggaccaagtttttcagctttgactaatttttttgttgttctcttttctcactaggtatgcaattgttcgttttaaccagtactttaaaatgaagcctgaggttactgcattaaaagtgcctgagtaaagaagagatttaattattctccagtagctgagcaatgcttgtgaatcttttcttaagaaatcccaaaaagccaatattagttaaaattctgttgtttaatttggttatcttgctttataaattatgcctctaaacaatcaaatctatttttgaaatagactgaatgatgtcaagaaatatacctactgctatccgtatgtggtggattagaaatgtgttaaatctgcaaaaggtataaagatgtcagtttaatttctttgataatttaacctatgttgtatgtgaattatttattataaacttagcacgattctgtgactgtttttctctgtttcacgttcgttgagtgtaagcaatgaaaatgtcccaaataagttttttaagttttactttaataagattaatttcagtaaacattctagttgttcagtgtaacctttttatcttgatgcattgtaagtaaaatgaatcatttactcttgaaatgccagtcattgactgatgtagataatttaggattttcatataaaaatagctgtttaggaaggtgaaatacattcactgtctctgttggtggtacatcttgttgaattcaatattagaaagtatttctttttggggtaatataacttagaattaaatccctgtttctctatgtagtctggcagtataaatataaatatttaccatataatcttggaataagtattagttaatgttaccaaaatctgtattaaataatgttttcaaatgctaaatatggtcgttactattttcagttttaaaaattttatagtatcaaattgtttctaaccaaaaatttccttttacttctagagatgctttatgtttttgattattaaatagtcactagtattgctaatttttgaaacaaatacacaaaatttatcatatgtagaaataagaaaatattgtttaggttaattattttttacctatccagagtcattccttacatttcagtttcatgtttcattcctcacattttagtttcatgttttagtttgattctatgtttttagactgatagcaaatgattacttgatacatgtaagttcagcgttatatgttgaggcagttatataattaaataaggaacacttagggcattgatcttgtacacttaaaatctgacaaatgacaaaatgtgaattaagcataaatagtcatggcaggagggcttttgtttatttctcttgtttttgtttaactgtatttttaattttgtctggtggtaagagggaggtaattattgtatggaaagaagttagatctttcagatagataaataggcttcaggttttgaagtctgctctgtgtagttgagcagtcatggttaactttacttagaaaattagtctgacaagctttgcacttcggtcacataagtgcccatgtacaaagttggcttactggatctgcatattcaaaatatgcaactacaaatttatcctctgagaaatcttctgaggagtctaatgtattccaaatgacttaatattctcagacaaatgctttaaaatacttggattatctcaagatttttgaagctaataaagtaaatagaaacacaggccattttaaatggtaaattctagttacataaatataatcttaaagtatgtttgtatctgtaacagtgttagaccagatttggtttctacctccccaatgttataaatgttcacttttgtttttataaaccatattactgtaagatcaatagaactttgcctagttaagtgaatggaaccaattaaacaactagtagctttttataatgttagtgtgaacttgaaaaattgtttttggtggaatttttgtctgtggttagaacattttcataaaacagataaagaatgtgtaatactcttaatttttttttttttttttttttttttttttgctttctgccttctaaagtgcaacagtatatatcttgtagaactgtgggaggagagaagataatttttctaccttactccatattcttacttcaaactattttgaatagaggttcactgagccattgctgatagactgtgcatagctactagctgtcacactattgtaggttttttggagagattcatagggaagtgaatgtaaccaggaataaaggctctcactttagctctgggactatgcagtggatcttgggaacaaaataagatatctaatctattttccccattctggctagattttggttgttgtgatgctcctacttcctgtataggtttttgggatcatggtgcaggctagtaataggattcagaattgcttcccttttatatcgaccatgtaagggattctaaaggagggtaaatctcaaagtgctctgaaatcatccctctaaaatctgtcctgtggtgtgctaagatgtctgttgcctttttatgttaagctaaggaacttgaatgccttacctaataactcaactagtagtaagctcattttgtaaatatgaaaatggctgtaagaagtggcattcatgtatattcaatgttagtcaatagaccatagtggcctggatgctttaacaagccaaattccgcaattttttttccttttttccccttcatacttgtatgatctcacctgaccagtgatttcttttcctcctaaccccatgctaccaccattttctggaaatcaaagagatgtggtagtaaatcatacagtacacacgatcatctgagatcaatatgagcacaaaactcatcaagtaggtctgcctggaatgtatataaaaaatgtaaataaaaatttgtaaattagtgtgaactgtatcttgcatatgagactgtgtattgttttgcattctcttcccttttgtagaaatttttctgtaaggaaatgattcagcttgttggttttagagtaaaaatagccaacagttgtggctacacagtgagatcacaggaactggaaatagggtttgtcggctttggttaatgtcagtactcatttatttagcctctcagtgcttaataagacttttctttattttttagttagccgttaggttttgtgaggttagattcctggaagcagtgaatttatacactgttatattaatagagctccgttctttgagtcatgattccaagctaaaggaaattaaaaatgtaatttaataatttcctatttttagggttgttaatttttttctacaaaaaaaccttgaaattttagatatcccaatgtgaatctaatttccatatatacagaaattagacaaataataagtctttagttcaacttaagcatatctcaaatgacttctctaaatttaaagttgatcatgataggatcataaaagacagaaaagacttaagtaatcttgtaatgacaattatttccatttttgctgaactaaaaatatttaacttcataaatatgttactacagcttccagatttaaagaaaaaaagtttcccccactctcaattaaaagttagaaccctccacttttaaaattatacaaatatttcttttttacattacacagaagccttctgtaccattttacgaatttctgtcttcataatataagtgaaaatactgtcatttcaattttctgctttaaattgtttttaataagcattccaaagtgatacagacttaagcttttaatcaatcagtcattcagttgatagacaaagttagcgatgctttatgctaggaaacttgttgacagtaacctgtgcgactttatgcagaagacaaatgctagtaattattatgcacagaggaaaaatcattttaagtatgtggtaaagcagcttcatctttcaaaattgatttgctctggtttttctttagtccattagattccagaatgtccttttactgggaatttagttatgtattaagataacctgttttcagttctttttgaaaagaagacattatttatattgaaccaccttattttaaaatttttaacttttatataccacttgtgtgattccagtgtcatgtcttgggtttgatgtcgttggacagaaaagtgtatcaattattttaaatgaatttttccccatgtttgaggcttagtctgtaaatgtgttgctgtaacagaaaatacttgggtatgcattacttgaatacttgaaaactgaaattaataagatgtattacataatgaattagatttctctgaacagtttttacactgaaaatcttcatttctggattgcagtttgaaatggaatgaagacctgaattatttgggtagaaaaaattatgatagtgcttataagaactgtaaactgttttaaactattttgtgtttgacgcatcaaacttcaagttttttgtaagtttctctcctgaaattttctttctcttctatactttatgcacttactatactactgatgtaataaaagagcagggttaaaaatattgtatctgtattcattgtgaatcctgtagcttttctagttaacaaaaaatcgctttctaaaatactcttaatcccattgttttggttaacatcttacccatttgttgtatttcaaatgccattaatcattttagtacaacacctatgtttataaaaatttgaaaacattacatattgtatttaaaactaattagtgaagagtaagaaaaaaactagccaacagaattgtaggtgatgcattagttaaatttcaaaactcataataaaggaactttcagagattggttgaaacccagtggtatccctgtaaattagctcctgtgactggaaaagaccccaaaaaggcagtagaggagattagtgtttacttgctgtggttgtggtgtgctgctacttaattataggtagtgacacactgaaattcttatttgtccaataatctgaagtagtttcctatatttatctgtactaaattgactataaattgagtctgcaaagaggaaactttttgactgtactgtatttaggagcctttgtacagcttggtcaaatttccatgatatgaagtatttgagttttaaaatatactgttattaaaaggaaaaagacatggccattattccatgtgcttaaatgataatttccttattcagtttcagaagaaaaagaatgaaattgggtaactgtcattgcgttagctttatgttgaattgggaaattgtggcataaagcttaaattcgtgtttatcaaatgtgaaccatagtagtataatgctgctttgtatataatgtaagtgctacaaatagtctcagcactgaaaatgtattgatacctcttaaatgaatgcaacttttgatgtaggtgttttgctatgcctcagaaaatatctgtctgagaatttgttaatctgtttgataatgaagatacttcctgttttcttgtttcatattttcatgttcaaaatttaagttttacatttttactactgttaatttaaataaaatttgttctgtggataaaatgaggttggcagtgaagaaaattaaaaacagcctcattcatgtaactggttaagtaaaaatacattttcactatgtgttcataaacttttaatgaagctgtttgtctttcagttcaaatataagtgatgtttaggctttatttctgttaataaggctttttaccattgattaaatgaaggaatgtatctttttgaagagatttatattctgtaaataaaaattcgttgtaacaataaagttgagttctaactacagtgtattcataaattttattgttacttcaacttatttttgaggttttccttgtgaatatctgcaaacacaagactttccaaagttagtgtataaatgtatatgtggagtgattctttgaattctagttttttgttttctgtttttttagttttatatacattaaaaagttttgaaaaaatgtttacttttggaaaaatttggttgagatgagactatggaatattacataacttataaacatttctgtttacctagtttaaaaattcattattcttctaactattatgctttgtgtcttcactattctttggaaccagagttgggaaacatagaggaataaagacactgtctgagacttagcatcttatggtctaggcagggattatccatttaaacaacaaactcttaaaattatcagatagtgtgatagatgatctctgccttcaggaaatgtttatttgccatgaagatcagttgtccataacaaaaatagtcattaatttgtgtttgtgtgtgtggtttttggtagaatgttttccagtttgggtttgtctgagactttctgatgattagcttgcagttatgtatccccaactggggataacatcaacaagttcctcatctcacagatgataccttaacaagtgatgtgttcttgttaaggtatcacatgtgagatgaggaacttgttgatgttaattttgatcacttggttgaagtattgttctgtgtcttcactgtatatttcccccttgcaacaaataggcagtctgtgggaaggtgctttagattgagtattttgttcccctacaaacatccactgttttcctcccctgatttagcaatacttgatgattcttacccaatccaatctttattacgatgattgtaaaatggtgttttaaaaatattgctatgttctccttttctcagcattttactgaaaggaattgtcctcttattggcatctaactacctacctacctacctacctatcaatcatctatcatctgtttgtattttaagtatagactcgtagatttctgttttattcagtggattataatctgctattaatactatatttattcatgtcattgttaaaattgtctgagattggtcttgagggagcccctcaaatctggttccttttgctatgttcccaacatgttttgagcgcttacttcctggcaaaagaagacattctagactcatcttgtaccttttctgcctcagccctggaatcagccatttctccaaagaacctagaggttccatttgggaggaatggtgtttagaaactaagatctgagaacttggtgtgcttattggctcctgagatattactgatccatcctaggttcttttggctggcagagcaagaaagcacgcacacacacatttatatacaaatctcttttttggagattgtgagttcatactgttacctccaatttctacacttgatcttagccaaaaggccaagttatacctccagcttctaactagaatttttccttgcctctctcattcatatttgtttctccctttacccactatgattacatttgtgtgtgtttttaagaattccacataattgatgtgcttgtttagaatgtgtcacattgtgtccgaaattggtgggttcttggtctcactgacttcaagaatgaagccacgcacctttgcagtgagtgttacagttcttaaagatggtgtgtccggagtttgttccttctgatgttcagacgtgtttggagttccttccttctggtgagttcctggtctcaccggcttcaggagtgaagcagcagaccttcctgatgagtgtcacagctcataaatgcagtgcatacccaaagagtgagcagcagcaagatttattgcaaagagtgaaagaacaaaccttccacagtgtggaaggagacccaagtgggttgtggttgctggctcaggcagcctgcttttattcccttatctgactccacccacatcctgctgactggtccattttacagagagctgattggcccattttacagaggtgattggtccgttttgacagggtgctgattggtgtgtttacaaaccttgagctagacacagtgctgattgatgcatttacaatcctttagctagacacaaaagttgtccaagtccctactagattggctagacacatagcactgattggtgtgtttacaaactttgagctagacacagagtgccgattggtgcatttacaaaccttgagctaggcataaaagttctccaagtccccacacaactcaggagcccagctggctttgcctagtggatgccgcgctggggctgcctgcagagttgcccgccagtcctatggcacgcacccacactcctcagcccttgggcggtggatgggactggacactgctgagcagggggcggtgcctgtcggggaggctcggtctgcgcgggagcccacggggtttggggtgggggaggcttgggcgtggtggactggaggtcccgagccctgccctgcggagaggtggctggaggcccggcgagaatttgagcgtggcgtgggcaggctggcagtgctgggggacccagcacaccctctgcagctgctggcccgggtgctaagctcctcactgcccagggctggcggcgctggccggcggctcggagtgcggggcccgccgagcccatgcccatccggaactcgcgctggcccgtgagggccacgtgggccacacgcagcctgggttcccaccagtgcctctgcttccacacctcccggcaagcagagggagccggctccggccagcccagagaggggctcccacagtgcagcggcggcctgaagggctcctcaagcgcggccagagtgggcactgaggccaaggaggtgccgagagcgagctagggctgccagcatgctgtcacctctcaatatgagagtgtataaggtgttactatacaaattactagtttttgtaaactttaatcatttgattaaagtggtaactgctggattcctcccaattctgcctctcccccatccctctttttcccccgtttttcccttttaattaatatcctgtgtgtgtgtgtgttgggggggatactttgaaactatgcaaatcttttgccattaattttagcatccattggtgggttttgtttgcaacagttacgtgtttgtctaacattgattttccatttccctcttctacatttggaaatgggaattttgctggaatgaggagtgataccttttttttacacttatttatttaactatatcagtaaggactcagatacttaattcactggcctataatccactacaatgatttttctggccaagttgttgaccaaaaaataattttgttgctcaagtttttcgttttggcaattgggaactttttcaacttggcttgtgtatcctttcaacatgcctatggtacaggaattgagaagaaattactgatgcagatagtgaaggtatggaagtcctcagtaaggttttccttttaactaggtggctcacgcctgtaatcctagcactttgggaggccaaggtgggtggattgcctgagctcaggagttcgagaccagcctgggtaacacggtgaaaccctgtgtctactaaaatacaaaaaaaattagccacgcgtggcagtgtgtgtttgtagttctagctattcgggaggctgaggcaggagaatggcttgaatccaggaggcggaagttgcagtgagctgagattgggccactgctctccagcttgggcaacagagcaagactccatctccaaaaaaaaaaaaaaaaaaaaaaaaagaagaggaaagcagccccaaatcattttcccttctaacaaagagcagcctgtaaaattgagctgtggacatagatgccggcagttgtgccaatcacgttcaaatcatgttcagaatggcagcaggtcttcccttctttgccagccacgtgtacagtaaggagcagataagatggtgccggccaaggggaaaattcatttgcgtaataagcttagggtggggcgtccagcattcccaggcaatatgatggaaccaatctattagcccaatctgttagccctacataaatcagacactgcttcctcaagccagtctataaaatccggacatgggtggctggctggccttttcctctccaaagtcccttctctctcactagacagctgttttcctttctctttcttctgcctattaaacctctgctcctaacgtccttgtgtgtgtctgtgtccgaaattttcatggcaggagatgacaaaccccaggtatttaccccagacaatgtagccacttcacctacataattatttttatgtatttattatttcttaacctctagcacttgcagtgtaagcctacataattttttgagcacttctttttctaacaacatgaggtgtttcaggctcatcttgtaccttccctgccccaaccctcaattcaactgtttcttcaaggagttctgatctctctttttttttttttctatttattagagaatggtatttagaaaccaagactgggtgccaggtgtgcttattactactgagttcttcctacttccttttttttttttttttttgagatgcagtcttgctctgtcacaagcctggagtgcagtggtgtgatctcagctcactgcatcccccacctcccaggttcaagcgattctcctgcctcagcctcctgagtagctgggagtccaggcgtacgccagcacgcccagctaatttttgtatttttagaagagatggggtttcatcctgttggccgggatggtcccgatctcttgactttgtgatccacctgcctcagcttcccaaagtgctgggattacaggcatgagccattgcgcccggtctgagttcttgctacttctacattccatcagtggacatttagaaaatatgtgtagactaatatacacacacatgcctctatactttttcatccatgtttgtaactttattttgaactcatttcaaatatacagaaaagtcacaagaatcatttagtgaactcctattttttcccatgtcctccaataagtatttgctttgttttatcattttctctctacatctataattttgggaattatttgagagcaaattgtacacataaatttcctttattcctcaattcttgtattttctaaaaacactattctgacc

SEQ ID NO: 487 - DNA, 2383 bp, Homo sapiens
gtgaccggaggcgagaaaccccgcctcggcaccctgacgcagcgcaggacccgccccgcgcgtgacgccagcgtcaggccagccccggcatgctctgcggccgcccgcggtccagctccgacaacaggaattttctccgagagcgggccgggctcagttcagctgctgtccagacccggatcggcaacagtgccgcctccagacgttctcctgccgctcgcccgcccgtcccagcgcccccagccctcccgcgagggcgccccgggacggaaggatccaccagtctgtcggcgcccgccgttctcgtggtcgccgtcgccgtcgtcgtggtggtagtctccgccgtcgcctgggccatggccaattacatccacgtccctcccggctccccggaggtgcccaagctgaacgtcaccgttcaggatcaggaggagcatcgctgccgggagggggccctgagcctcctgcaaacacctgcggcctcactgggacccccaggaggtgaccctgcagctcttcacagatggaatcacaaataaacttattggctgttacgtgggaaacaccatggaggatgtagtcctggtgagaatttatggcaataagactgagttattagtcgatcgagatgaggaagtaaagagttttcgagtgttgcaggctcatgggtgtgcaccacaactctactgtaccttcaataatggactatgctatgaatttatacaaggagaagcactggatccaaagcatgtctgcaacccagccattttcaggctaatagctcgtcagcttgctaaaatccatgctattcatgcacacaatggctggatccccaaatctaatctttggctaaagatgggaaagtatttctctctcattcccacaggatttgcagatgaagacattaataaaaggttcctaagtgatatcccaagctctcagattctccaggaagagatgacttggatgaaggagattctttccaacctgggctcacctgttgtgctttgccataatgacctattgtgtaagaatataatctacaatgagaaacaaggtgatgtacagttcattgattatgaatattctggatacaactacctggcatatgatattggaaatcatttcaatgaatttgcaggtgtgagtgatgtagactatagtctgtatccagatagagaactacagagtcagtggctgcgtgcttaccttgaagcctacaaagaatttaagggctttgggactgaagttactgaaaaggaggtagaaatactcttcattcaagtcaatcagtttgcattggcttctcatttcttttggggattgtgggctttgattcaagccaaatactccactattgagtttgatttccttgggtatgcaattgttcgttttaaccagtactttaaaatgaagcctgaggttactgcattaaaagtgcctgagtaaagaagagatttaattattctccagtagctgagcaatgcttgtgaatcttttcttaagaaatcccaaaaagccaatattagttaaaattctgttgtttaatttggttatcttgctttataaattatgcctctaaacaatcaaatctatttttgaaatagactgaatgatgtcaagaaatatacctactgctatccgtatgtggtggattagaaatgtgttaaatctgcaaaaggtataaagatgtcagtttaatttctttgataatttaacctatgttgtatgtgaattatttattataaacttagcacgattctgtgactgtttttctctgtttcacgttcgttgagtgtaagcaatgaaaatgtcccaaataagttttttaagttttactttaataagattaatttcagtaaacattctagttgttcagtgtaacctttttatcttgatgcattgtaagtaaaatgaatcatttactcttgaaatgccagtcattgactgatgtagataatttaggattttcatataaaaatagctgtttaggaaggtgaaatacattcactgtctctgttggtggtacatcttgttgaattcaatattagaaagtatttctttttggggtaatataacttagaattaaatccctgtttctctatgtagtctggcagtataaatataaatatttaccatataatcttggaataagtattagttaatgttaccaaaatctgtattaaataatgttttcaaatgctaaatatggtcgttactattttcagttttaaaaattttatagtatcaaattgtttctaaccaaaaatttccttttacttctagagatgctttatgtttttgattattaaatagtcactagtattgctaatttttgaaacaaatacacaaaatttatcatatgtagaaataagaaaatatt

SEQ ID NO: 488 - protein, 323 aa, Homo sapiens
HLRPHWDPQEVTLQLFTDGITNKLIGCYVGNTMEDVVLVRIYGNKTELLVDRDEEVKSFRVLQAHGCAPQLYCTFNNGLCYEFIQGEALDPKHVCNPAIFRLIARQLAKIHAIHAHNGWIPKSNLWLKMGKYFSLIPTGFADEDINKRFLSDIPSSQILQEEMTWMKEILSNLGSPVVLCHNDLLCKNIIYNEKQGDVQFIDYEYSGYNYLAYDIGNHFNEFAGVSDVDYSLYPDRELQSQWLRAYLEAYKEFKGFGTEVTEKEVEILFIQVNQFASHFFWGLWALIQAKYSTIEFDFLGYAIVRFNQYFKMKPEVTALKVPE

SEQ ID NO: 489 - DNA, 64135 bp, Mus musculus
  misc_feature (1)...(64135): n = A,T,C or G
tggctaggattgcaaacatgccataccatacttggtctctgccctgatttttgtttggtccaggacctttctggagagttcttcttgggttacagggttctgtctgaggtgtcgaatttcggtgaaccagattgtggtaatacacagactcttacatgcaaatcagttcctctccattcctggtgcttctctgatgtccacgtttgaattaaaaatgaaatacttgtttggccagcactcatttctccagggacctggctcttcccactagaagagagcagagttttaaaaatagttataataaagaacttgcaaaaaaaaaaaaatcacacaccaaattcaaccaacccaaagtttgtcagtgaacttctaactagtgtgaagctatgaagcttcacactggattcacactgtcactatgggatatattttaggcacttatctaccacaatatgaaaaatccacgacagaattgaaactaaagaacagaaacaacaacagaaacccaatgagcttttattaacttttttttgtctttttaaaagatttatttattttctttaggtatgtgagtacactgtcgctctcctcagacacaccagaagagggcatctgaccccattacagatggttgttagacctgcagcaagcatcctaaccacttgagcagtcatgttaactccagaccaaggcaaacttctcagtactgactgcccccactggactccaggtcaccagcaagaaacaggaacccttctgccctgaagacctcacaccttccctccttggtcttgcccttggagtgcaggtggggaacagatgttcttagactcagttgtccctcggatccaggtttgatcctcctggcaggggatgagggataaggggcacgtgcatcccagacgcaatcatggaaacaggcaggatccatttgagacaaatttgtaaaagttacacttctgttcagagttggacatttctgtgtcagtgggcattgtgcggcgtccagatgtgacctccatgcaggcaggctgcccctggcctggacttctccagaggctgtcagtgttgcttacactgaattatgttgatggcccagtcgtgatactttgtatccccatacttgggaggctaagccaagagggttatgaggggcagcctgggttatagaatttatatgtatgtgtatatatatatatatatatgtatatatgtgtgtatacatatatacatatatatatatacatacacacacatatatattagacacacacatatatatatttacacatatatgtatacacacacatatatacatatatatatatacatacacatatggttatacatatatacataatgaaatacatacatacacatacatatatgaatatacatataatgaatatatacatatatacataatgaaatatatgtttatttttgtacacatacatatgagtataatataaataatgaatatatatacatatataatgaagtacatatatatacacatacttatataaatatacacatataatgcatatatacatgtatatataatgaaatacgtgtgtgtatgtgtgtatataggtacttatctgtcatctcatctcagcacttgggaggcaaaagcagccagctcagtcacatgatgaatttgatgctagcctggtttatccaaccgtgtctgaaaaaagaaacacagggcactgccaagacggctcagtggctaatggtgcatgccgccagccaagcataaccacctgaatggtgaaaggagagagcctcttcctgcaaggtgccctctgacctccacacttgggctacggcagcctgtgcacacatacataataagtaaatgcaatttaaaaaatagtttgtatctcagctgggtggtggtggcacgaacctttaaccccagcacttgggaggcagtggatctccaagttcaaggccagcctggtctacagggcatgttccaggccagtcaggactcagagggaaaacctgtcttgaaaaacaaaacaaacaagaaattgtgtctcatggaaagggtgcatttgtttcctgcaactttttaacctagtaacatcattaccattttgatgtttgtacaatggcaaaactgcccagtgagttcatttctctgggccctatccctaaggcttggataaggacaccctgagccttatttaccatagaagacctacctgtctggtatttaatgtgagccagttcagtgcttaagaaagcatacactcttattgcctagggccagccacagctctagaggagacacaccactcatttttggtttccatggacactgcattcacatgcagaagccacacacagacatccacatatgcatatcatttttaaaaagaaaaataaaatcctcttctttaatatgagtcacattggtgtgacggtgcgcatctattgccttatctacgatgacagccagggtaggaggaagcctggatagcaacacaagtgtttgttggtttgtttgtttggtttggtttggtttggtttggtttggtttggttctgtgaaagtgtaaaattggagggagacttgctcttttaccagaggaaatcaacaatgctctccaagtccgctgcttttacttagcatgtagctcatggctctctgaaacactaaatagcaaggtcactgagtgtcatggtttggatatgcttggcccagggagtggcacgatttggaggtgtagccttgttggagtaggtgtgtcattgtgagtgtggatttaagacccttgtcctagctgcctggaagtcagtattctgctagcagccttcagatgaagatgtagaactctcagctcctcctgcaccatgcctacctggatgctgccgtgctcccaccttaatgataatggactgaacctctgaacctgtgagccagccccaatcaaatgctgtccttgtaagacttgccttggtcatggtgtctcttcacagcagtgaaaccctaactaagacactgagcttccttccctaacacttcttcagccactccccgggacattcctatgaggcgagattctctgcagtcatgaggaaataggtagagtcatttgctcagagagggagaaaaaaaatgttgctttctgtgggacacttggcccagtcatggggtgagtatcagggtagtggagactaacccaggttccaggtccaggagatttctgaaggtctgtgtgattgtatgggaggctccagacctgagccttctcttcagtcagagtctgacttgtttacctcacaaaggtttggtgctgtctcataacaaataataataataatgatgatgataatgataaacaatgcagtctcccctgttaataacagaaaattgaattttgttaaaggaagggctttctgtttttccaaaaagggccccaagggattagttcatgagacagaaagtagaagctgggacgcagagaagacgtcaaaatgccctgagaggaaagacaggaagtagaggaaggagacaggaggcttcctgcacagggttgagccctccaggacccagtgaggttttcatccaatgtctcagtggccagctctctggtggaagcttcggaaggacccagctctgcagcttgctgtgggtggggctgccagcagtcagtgtgcatggccctggggacagctcacggggggggggggggctcacgtttaataagcatttccatgggttcacctctacatggcaccaggcgctgagcaggcgtggtggtaatgtagctaaggaacagtctttcttttatcaaccatccagcaggcccaaggccccgggtacacttaatctagagctgggcaggctgctactttatccttggtgaaagcctaccacctctaggggccttagaacccagcacagaaagcggcagaacatgggcttgccactttccgtggcccaggcggacacatctgtgtatgttttctcggtgcagaatgttctgcccttccattcaggttcttcaggagcagatttagcccctagatgtgaactggaagcagctatcatttggttctattttaaaatttcaaattatatttgtgtgtgtgcgcacactcgtgaatgtgtgtgcgagtgtgcataggccagaagacaacttttggaagtcagtgctctcttcttaccatgtaggtcccagggatgtctctcaggccatcacaggcttggtggcaagagtctttacccaccaaaccatcctgccaggccaactgtttgaggatttgtcctccagcattcatacgtgggaaacttcatcccaaattccccatgttaatcccttgggaggtcatcaggaccagatggggtcacgagggggaggattagtggctgtgttcatttgtattttggggacatgatctttttttttttaagattcatttattatatatgagtacactgtagctgtcttcagacacatcagaagagggcattggattccattatagatggttgtgaactaccatgtggctgctgggattcaaactcaggacctctggaagagcatctggtggtcttaaccactgagccatctctccagctccccaccaccaccaccaccacaggatcttaatgtagctggcctggaattcacttcacagccaagcatgaccgagttattctgatgctcctgcttccacctcctcagagctggaattaccccttttgccaccaagcacgtggtgtagtactggggattgacccaggccttgcatgcgtgcaaggcaagctccctgctaactgagctacttcccagcccacgtcagaggcttgataatgctggagcagatgcggggtgggaggaaagagagtttggacatgtggtaccctactgggttatgatgcaagagtgcccagtggatgccaagcagaggtggcacgtgctcttagacttcccagttcttggagctatgtatttaataaatgccagtgctttatgagttagtgtctttatgaattagttagggtttcactgctgtgagcagacaccatgaacaaggcaagtcttataaaggacaacatttgattagggctggcttacaggttcagatgttcagtccattatcatcaaggtgggagcatggcagcatccaggcaggcatggtgcagctggagctggagctggaaccttcacctgaaggctgctagcagaagaccagcactacttccaggtagttaggatgagggtcttaaagcccacacccacagtgacacacccactccaacaaggccacacctcctaatagtgccactctctttgcatagagcatatgcaaaccatcacaattagcttgcctccattattttttttttcttaccataacagaggacaaactgaaactagaccttcagactgctaggggagcctagtcagattccctgagcctccccttttcagcaggacccagcttttcctggaaacagcggccctacagcggccctgcccgcaacgcaaggactaggtagggtgccagccatttcctgtatgagccatacaggcctcatccaacattctgtcaaagtacccagactgctttcccagaattccaggttgggtccatcaacaaggacaactccgggatgctagaacttgtgtccaaaggagcagtggtagctcctgggctacgtctggctggtggctgcttctgagaccctctgccacgaaagccacaggaccagcacgaatggcgtcttttcagcctgccagcccttggcactggcctcaggaagaatctatgacctaactaaaacgtatacaatggctaaaatcaggcatgtgctgacccacaaaaggctgagcaacacgttaaatatattcaacctcaccagccatcagggaaatgcaaataaaagcgggcttggggagacggtttagttgttgagagtatacggctatgcagaggacctgagtttggctcccagcacacacttgttagctctagctccagggcaccccacgccctcctctggagtccatgggcacctgcgctcacacatgcgcatgctacccctgggcaggcagtccggggaggtgtgagggaaggagcagaatgtgagcatggggagccagccagtgagcagctttctacagcctgcgcttcacttcctgcgtccaggttcccgctctgcttaagctgccgctttgacttcagtggcgcccctcagtgaaaaactgtaatgggggctgggacgccaaataaaccttttccatctctaattgccccccccccacacacacacgggtgtggtggtttgaataagaacagcccccaagggttcatatgtgtgaatgcttagtcgacacataagaaggattaggaggtgtggccttgatggagaaagcgtgtcactggagtttaaaaagtccaggccaggccaactccccccaaagcccctgtctgtggatcctgttgtctgtagaactctcagctacttcttcagcaccatgtctgcctgtgtgcgtccatgctacccaccaagccttggagggtttagaggaagaaggtaggcaggaaggcaccggggaaatccagccctctatgtgatcataacagagtgtctatcccagcttgctctggagggagctggctggtgtctgtttggagcagggggtcagagtcatgggcagtcaggacggtatgggacccaagccccatactatcttcagcaactcgtggcctcaggatcctgtcacaggactggaaaagacttcctgaaaagatgttccaaagactgcacaggaacctggggcccaggatggaaaaccaagaaaaagactggatatttggtctggagaaacccctcccgaacttctccaaactgctctacctttcagagcagtgcggccctgaagttttgtgtgttttttgttttgctgttgttttacaacaaaagctgtttctgagattctaaatcaccattatcaccaccacgtaactttaatttttttttcagtgtctatttttaatgatggttcttaaacgctttaacctcccttttagcccaccacccaccacttcagtgaaacattccttcatgtgtttgccccagcaaaacaccatctaacagactttggaccaaagaacccttaagtttccacttcaccactatcatcaccaccatcgtcatcatcatcaccaccatcaatcactaccaccattaccaacatctactggcatctatccctgcctttcctcttcactctttgtaaatgacaggagcatctgcctacttgttcaatgcaaacttatccaaaccaaacctagggctgattccagacatctctttcctcacaagccacacccacccctcatcaagccctcctctaccagacaaagctaccgttttgatatctcgtgacaggacactgttgtctacaaagtgcaagtctgagatgcatgtaatcaagttaccaaaaaaaaaaaaaaaggttgtaaaagagctttctgcaatgttttgagtaagttcatgatttcttgctgggccaaagtcacaaccaccctggggtgtgcggggcctgcgagctagaaataagccaattcaacctctggcccccatggtttcacagcctccacctcagcgcctccctcctatcactggatctccctagctgtcttctgaacgacaggttagattccacacctgtctccacataaaccttactagtggcctgtgccataacaggaaataagtagagtctctggtttggtttaccttcaacagctaggcagaagttgctgtcctttgcagagttaagaaagacaagagttcctttcttgtcactgcccccaccctctggctctccaccggacactcattacatcattagcatacacctgcatctgaggttaacctcttctgtgcttttacacatttgctgattgatctgttaaggaaggaatctaaggttgtctgggctgaatagaaatggtcagacctcattgtttcagagatgcagagagagtcttggatccagttgtatatatagctgcagacttacccaaggacacagatgcatacaatcattaccttgttctcgatccatgattggagccattactgtcaaggatagcttccctctaaatgttcctgccaggttatcatgaagagaaatctcagcacatgttctcaggcccgtgcagatagcgacaatgctaacctttatgagcaggtagccacaaaaccggttcctgtaacttcacttaagactcaattgtccgtccttgcaggaaaggcctgctcaaggacattcgagagacaggattcaggaagctaacagatgtgtgcccctcaccccccccccccaaggatctagccttgtgcgctgcctctatgtgaaggagcacctctgtaaactctaggatactttatccagtctatgcttaattaatgtgtgtgtgcttcataatgagatgtttctaaaaacaaaacaaaaagtacagtccctgagagatggctcaggctcacgagggcttcctgttcttgcagaagacctacgtacggttcctagtacccacgtctgttggcgtaccactcactacctataacttcagcttcaagaaatccaacatctcctttggatgcaagagcacccacagactcaatgacattcagacagtctctctctctctctctctctctctctctctctctctctctaagtagaaataccaggattagcacctgacctgcccacctcctgaacactccccccctctcagcccagggaacttgtctacaggtgccatttccagattcaccaccagaactttcagagcttttgactagcagctatgcatttaattaccgattgtcacaaacacagactgtctggttctcaggctctgcacagagtcaggctaggccggagacaggaaaacaacagaagacagctgggaacatttaccaaggaaaaacgattcatagctacctgtggcccagcccaccaagggaaggctggagggaggtcagaccctggctgagtgagtgagtagtgactaggtttgtagaaggtcctagaagaggattttctgggagaagaacttttttttttgggagcagagttggagggcaaaagggaatttccatggtcagctggttgacgagcctggggcagatctgtctccggaagtctgctgctccaatggaacaccctggactggtgaccttccaggatgtgaccatcactcttacacactcacttgctgtttttgttttgtgttttattcagactgagtgtcacacagccttggctggcctgaaacttgctatgtagaccaggctgccctcaaactcagggatccacttgcttctgtctcctgaatgcaaggtatcaaaggtgtgcgctaggatgtaactgcaacaacaacacacttggtattttgttttgttttgttttgcttgtttgtttgtttgtttgttttcgagacaggatctcactgagtagctctggatgtcctggaactcacagtgcagaccagattactcacatagatccgcctgtctctgcctcctcctaactgtctccactgtcgctgtcctttctcgcagtattcaatcacacccgtggaaagccagccttatttttgacggtacttaggaactcaggctcttaggcagtcctctatcactgaactacagtgcgagcaccctgttttctaatacagaactgggcacgctcgcccttactcctgcgcctctccaggccacacgctcccacgctgagatacaaatcgaggacaggatctatgcacaggagcgctccttttttgagtctcgcccccttctctcacccggtccactgtagcctaagccacgcccctagaatagaaacaacgccccgacagcgcgacacgcccccgacacgccccttcgcgtccattggctgcccgcattgtccgctccctggcccgagcggtgattgcggcgcgcctgagtcagtccagggagagagcgcgggtggcgggccaggccgcgggacagccgcaggtggggcctggagcggtggccggatcgaggcagccccgcagccccgcgcgggagccaagatgcctcgcggggactcggagcaggtgcgctactgcgcgcgcttctcctatctttggctcaagttctctctcatcatctactccaccgtgttctgggtgagtgatggagcccgtggagccggggtcggggtggggtatgggacggtccacactccttcgatggccccctaacactcgacccaggcttgggttcagcttcagccactcagagaggccgccgggagtgcgggagggcttctcgcaccacttccctgggaaccgggataccttggcggccccagctctgctcggttccagcagcccagtcagtcctcagcgttcgagccctgttgcccacaggacgccactttgttcacctatgctgctgagctcctacctaatggggtccggctcgccagccgagtctgctgtgcatcctctggctgctgtgtagggcgcgggtacgttgttgactgcgcccaccacgccttcagggtgtgactctccacagcctggccaaaggtgggcagcttttgtgcttgtggccacctggattccaagtctggcccctgttgctacttgcctgtgcctttcctctgaccaagatgtttctcttgggcatcttgctttcttccttgttggaaggaaatgctttcttgttggagtgcggcattccacttgacaacccggcggctcctggatggtgttgctattttcatgaggtctggcattgcccatagaggatcaggatggcattggttgcgcacaaccaggctttgaatactacccgccacttcctagctgaatggtctggaaagttccttcatttctctgaccatagttttctcatctgtagttggagacagtagttattaaacacttggatggttgtggaagtaaaataacgcaggccaagatgaggccacagagagctaaaaaaaaggggggagatagtaataatataattattatattataattataaaaacattaacaataaataataattattagtatttattgttattgctattgttttttgggttttttttagagacagggcctctgtatgtaactgcctctgtcacccaagtgctggcattaaaggcacctattattattgttgtagttattgttgtgacagggtcttactatagcttagtctagctggtggtggtgtatatgtgtgtgtgtgtgtttgcttatttgttttgagacagcatcttatgcatttctggttgatttagaactcactaaatagtccaggctaatcttgaactcagtaatcctcctgccttagccttccaagtattggagttacagttgtaagacaccatgtctggcaccattaatgttattatgggcaagaatctttgcctgtgaatggtataagctaaaaggtccccagggacatttccccccacagggtctcatgtcatctaggctggtcccaaactcactgtgtagctgacaatgaccttgaacattggatcctcctgtttgtacctcccacacactgggtactgggatcacaggggtgtgccactacccctggcttatcagggcattttagaataactggacttcagtctagacacgaggatatctttccacaggttggccctgtgtttacctctacagaagtgtgtatgtagataggcttgtccagagatcccaaagggtcccctgaaaataaggtcctccctccttccctcccttcctctactttctctccctttgtctttcttctcttcttcctcagctccttactgcatttcttctgtgggcaggaactgctgggctggccatcaagactgcctttgaatgggagccctttacaaggcgaccctgctggcagtcagtagatcttgattctagtcctgctatgtcccagactcactggcatattgtaggcaaatgatatctgttttgggtctcagaaatgttggttctagcctttggctagcttcaactccaggtaccccgaaagaaagattagcagtgttgctaggctcccaagggtagagggtggggcagagacatggggtatgagttgcagggagtctgaaggttcggatagacgatttgagctataactcagaggctctcacccaaagttgcatcggaattaactgggaggtttccaacagatccctgtgccttggcacacgtgtttattactgtgtacctcagctcctcacacaactgcagtgtgagccagggttgaaaaccccaacgctggatgggcctgggagaccacagtgattctgctcagtttagtcctgtctataagtcagagacaaaagggaaagttgaggacaagggtggaaaggtggggggtcccattccctctccctcctcacctccattccatacctcctcagtgtgtaaccactggctcttcatgcctccccctttacacctgtaaaatgggaatgtgttacactctgtcttgcacacccacagcatccctttttaggactagtagtgagagagaatgaggaaagagctggctgaacctggtgagatacagacccccccccaaaccttgtcaaagtaaaacacagttatataaaatcagaagagctcacaaggcccaaatcactgccccttgcagcccctccccacccccactccaccctctttagccaaccaagcctgctgtgtaccaaccgagccatccctgacggtatttctactttaaaaaaaaaaaaatctccccacccaggccaagaactcagctgtgggcaaggctgctgggacggctccaggtaccagagtgtgactgcagggtgactgcagagtggcagcgggcggctgccggttaagtaatttgtctggattgagtttcctgctaattgaaaagcatttacagaaaaacccattatctggatgcaatctcctgcctctcccctggcaagaagacaggtcagagcaagggttactcacttaccaacccagagtgtgagtgcttgcagggcagtggtggccctttagtcccagcacttgagaggcagaagaagcaggtggctcactctctctctctgtgagtttgaggccagcctgagagggaaagggagagagagagggagagggagagggagagggagagggagaggnnnnnnnnnnnnnnnnnnnnagagggagagggagagggagagggagagggagagagagattttaccacagtgaaccttcagatcttctgtcaggctcttttagctttggtctcttttgttttgttttttaataggatttatttatttttattttgtgtataagtgttttgcctgtatggaagctgtgttaaatgctttttcaaaatagtgtcaactattcatttgttatcttgctatatggattatacacatatacggagatcagaggacatttctggatcagatagttctctcttccactctgactctggggatcgaactcagactgtcaggagtaagcggcaatcgctcttacctgctgagccatcttgccggccctccttgactctttgtctcctgagaaatgtctttagagatgagaaccttggtgtaaaatcagaactgcttttctgctgttgagctggtagagtcccatacacgttctggaggtcaatccctcgtcccacagggcagcagcggcggcctttctaagcctgcccgcattgctccaattttgtccgtgtgctgttgaaaccagcaaagcttttattctgagcataacagataagggaaaggagggggctccatctgggctgatcgtgcaagaacacttgcttgcccagcgtgagcagcccctggatttgatctccatcccagagggggaaaccatcaattgtttctatatcagcaccctgcgctttcccacactgcacagtcctccctgatggtcctttacagggactctggccactcttcccaaccacttgtatataattctgctggaagtgcgtgtggcttggccaagggtggtgggaaggagggaggcgggtagagtatatagatggggaagaacctgggtgggggggggcttcatctacaaagtcatgggggagtcgtaacctatgctggggcacaccttcctgaagagctgctttaaggtcacccaggctcctgccatatgtgtctggtgcccatggaggccaggagaaggtattcgatcccttagatcggtctggagttgtggagttatacagttgtgagctgccgtgagagtgttgggagttgaacccggatcctctggaagagcaaacagccagttctcttaaccactgaaccatttctccagccccatgaccatgaattcataatctctctgatgtacctccaaaatcccgagattgtaggcagatatcaccatgcctagcttataaaaatcgtcattgactctgcaggattaggtgcatcctctcccactgaggccagacaaggcagcccctctactacttatgtgctgggggcctccgtccagcccatgtatgctccctgagttcccaggggtccaggtcaattgacactgttgctcttcctgtggggtgcccatccctttcagggctttcaatccttcccccaacccttctaagaggttccctgtcctccatccaatgtttggctgtgggtctctgcatctgtttcagtcggctgctgggtggagcctctcagaggacagttacgctaggctcctgctataaacataacagagtctcattagtagtgttggggattggtgcttgcccatggaacgggtctcacattgtgctggttgttagctggccattcctttactcactgctctatctttgtccctgcatttcttcaagccccaattaaatgcttcttcctcctcctcctccttcttcttttaataagagttgttgtggtcgtgatgtctcttcgtagcatcaggacactgactgtgacactccattagagcccgttctgtatgggtatagcaagagcatctttagcatcttctctatggactgttccacgtagaatgtaaaagggagctggactggctggtctcgtgtgtcaacctgactgaagtgagtgagactcatcagaaaggaaggagcctcagctgagcacatgccttcatgaggtccagctgtaagacattttctcaattagtgatcagtggggggttggggggcccaggcctttgtgggtggtgctatccctggcctggtggtcctgggttctataagaaatcaggctgagcaagccggtaagcagaactcttccgtggcctctgcaccagctcctgcctccaggttcaggccctgcttgagttcttgtcccgacttcctccattgacgggctgtgatctgtaaatgcaagctgaataaaccctttcctcccctccctccaaaaaacccatcattgacagaaaatgcatgcaatgatacacaaataaaaagtagaaagggcggtggggggaggggtcggaaagatggctcagtgggtaaagcctgagtttgatccccggaacccacttaaaggtggaagaagagacctgactctagggttgttctctagcttcatgtgttccctgtgacccatgtgcccatgcacgcacaataaaaataaatacaattttaaaaaaattaaaaggggtctttttgtctcaaaactaaaggtgaagcagacggccagtggcacccttcccttcctgctctggcttgtctaaaacagagggaaccctgctattaagttatccaaggcaatgaatgacctcggtacaaacatacacatgcagtatgtaatatttacatattattatatacttatgtaccacttatatattatttctatatatttatatattaatgttatattaataatactatattgataatattatgtattttttttcctcactgtgcaaggaaatgtgggaagcctcatcttttcacttaatgctttagtgcttttgtttgggaggcagggtctcaggatgcctttgaacttcagatcctactggatgctagaattataggcatccaccactacacctgctttatctgatgctaactattgaacccagggctcactttgcgcatactagccaaacactaccaaataaaccaaatcactaggacttcactcaaagaaaaatctttgtaaactttgtgatctgctagggtctacctctgtcttctaattagttggttaattgttgtgtgtttatggtgtgtgtgtgtgtgtgtgtgtgtatacatgcatctgttgcaagtcccatatcttgcatgtggaagacagaggattagctttttggagttggttctctccttccaccttttcgtgtgttttgtggctcaaacttaggttgctggggttgcaaggcaagaactcttacagactgaaccatctcacaggccccaagggctgccctcgttctatgtggcagtcttaacagtctccagtctaggctgtgccagtgttttatttctctggccacagctgggggattctgtggttgtttccaatctgaaccccctgttctgatgccccacactgagggggcttcttgaatgatgtgctcagggtcaccccacggggctggactgagcgctctactttcatcatcttggcccagaggtccccctgcttctcctaccttgtctccaggttgtccctgtgagtctcacccagaggcaccccgagccgcctcttcccacaggcagggtgaattattgtaacacgtgtgccctgaggtcacaggggtcacctctctaattttagcattgcccaggacatcctggagatctgtttacacacactgctttttcttgctgggctttgggctcctggaggtcaggggtgtggctcactaggaataccagtttaggactgagcgtagggcttgagggtgatggagttagccctgtacccacagggctaggattggacccaggacagagctgagcctggccagtgtgtgtaatttcttgctgttggccagattttgaggcataacttcaagtgggttagtctgaattcacggccagcacctggctctctagaaagccaagcctgttgttgggtctccttttggatctgtgtgtgtgtgtttgtgtgtatgtgtatacgtgtgtgtgtgtgtgtgtgtgtgcttgtgtgtgtatatatgtgtatgagcgggtgtgtgcttgtgtgtgtgtatgtgtatatgtatgtgttcatgtgtgtgtgtatatatgtgtatgagcgggtgtgtgcttgtgtgtgtgtatgtgttcatatgtgtgtgtgtgtgtgtgtgtatatacgtgtatgagcgggtgtgtgcttgtgtgtgtgtatgtgtgtatgtatgtgttcatgtgtgtgtgtgtgtgtgtatatgtgtatgagcgggtgtgtgcttgtgtgtatgtatgtgttcatatgtgtgtgtgtgtgtatatatatgtgtatgagtggnnnnnnnnnnnnnnnnnnnnnnnnnnnnnnnnnnnnnnnnnnnnnnnnnnnnnnnnnnnnnnnnnnnnnnnnnnnnnnnnnnnnnnnnnnnnnnnnnnnnnnnnnnnnnnnnnnnnnnnnnnnnnnnnnnnnnnnnnnnnnnnnnnnnnnnnnnnnnnnnnnnnnnnnnnnnnnnnnnnnnnnnnnnnnnnnnnnnnnnnnnnnnnnnnnnnnnnnnnnnnnnnnnnnnnnnnnnnnnnnnnnnnnnnnnnnnnnnnnnnnnnnnnnnnnnnnnnnnnnnnnnnnnnnnnnnnnnnnnnnnnnnnnnnnnnnnnnnnnnnnnnnnnnnnnnnnnnnnnnnnnnnnnnnnnnnnnnnnnnnnnnnnnnnnnnnnnnnnnnnnnnnnnnnnnnnnnnnnnnnnnnnnnnnnnnnnnnnnnnnnnnnnnnnnnnnnnnnnnnnnnnnnnnnnnnnnnnnnnnnnnnnnnnnnnnnnnnnnnnnnnnnnnnnnnnnnnnnnnnnnnnnnnnnnnnnnnnnnnnnnnnnnnnnnnnnnnnnnnnnnnnnnnnnnnnnnnnnnnnnnnnnnnnnnnnnnnnnnnnnnnnnnnnnnnnnnnnnnnnnnnnnnnnnnnnnnnnnnnnnnnnnnnnnnnnnnnnnnnnnnnnnnnnnnnnnnnnnnnnnnnnnnnnnnnnnnnnnnnnnnnnnnnnnnnnnnnnnnnnnnnnnnnnnnnnnnnnnnnnnnnnnnnnnnnnnnnnnnnnnnnnnnnnnnnnnnnnnnnnnnnnnnnnnnnnnnnnnnnnnnnnnnnnnnnnnnnnnnnnnnnnnnnnnnnnnnnnnnnnnnnnnnnnnnnnnnnnnnnnnnnnnnnnnnnnnnnnnnnnnnnnnnnnnnnnnnnnnnnnnnnnnnnnnnnnnnnnnnnnnnnnnnnnnnnnnnnnnnnnnnnnnnnnnnnnnnnnnnnnnnnnnnnnnnnnnnnnnnnnnnnnnnnnnnnnnnnnnnnnnnnnnnnnnnnnnnnnnnnnnnnnnnnnnnnnnnnnnnnnnnnnnnnnnnnnnnnnnnnnnnnnnnnnnnnnnnnnnnnnnnnnnnnnnnnnnnnnnnnnnnnnnnnnnnnnnnnnnnnnnnnnnnnnnnnnnnnnnnnnnnnnnnnnnnnnnnnnnnnnnnnnnnnnnncacctccagggttagagtgggaggtgaccactctcggaggagtcatcctcctccacctatgtcctggtaggtgatagcagatggaaagcaaagtggtttctgcagattgtcattgcttgttgcattgttgttgcagaatgcctagcccaggctagccaggaagtcaccatggagcccaggctggcctggaattcccagtgatactcttgtctcagcctagagagcaatgcttacaggtgtgtgcttccacaccagactcttgcagattttttctttttgaaaacgagccctgttttttttgagaaaaatcatacaagtacctgactatttttttttaaagcaatttaggaaaacatgaagacaataatttacctttgatcctaccccagtatgggacctctgtcacatattgattggcatctgtctggatatcttgtacatatgcaaaggtttttacttccggaattgtttttttctccttgattctttgggcagggctcgtttcacattccatgcaggtgctttagagagaacccagtgaaactccagctggaagccagcgaatggccttcccacagcccgggtctgggcctcctttagcctgaaccagggtgaggcaggattgcagccctctagtgtccctgttgtataaaggaacagctgtagggtccagaattctgcacaaggccctgttccctcctgcagaggaatggctacctcaacctgtacaaccggacccagcacctgtggctttggttctaaagaaacaggcagggctaccagccctccttctgcctctcttctctctaggtgattcacggggacacccatgggtggggttcataggaaaccagataagggactgatcttggaattccagtgccagcctgctccacccacagcaaagatgccttctgggtgaactagggcacaggacacagggaaaggcttacccagaaaggactctggacatgagttggtttgggttgacactttagttggagacaggaggctagaccagctgttctttctagggcaggtagggaaagtacagtaattcattctgtcaatgagttgacacctcctgtagaccagacacgtacagtacaggacacaaccatgaacaagaaaggtctttgggtaaagccttggagggacatattgctaaggtgggaattcgggagtcagtgggaaaggctaggaattcccactttaggtgttctggtcaaagaaagtcttcaccaggagctggcttggggggggggttgcaattgacaaggaacatcccgtagagaacaccccaggcaggcagggcaggcaggcaggtgggcagggtagggcagggcaggcaggcaggcagggtgcaaagtacaaaggccatgaggcaggcaaggcagggccgaggctggtgcagaggaggaacctagaagaagccagatatgggtggagagggagaggggatttgattgtatatggagtttagggtcagggtcagagtcactggaaggggacgtttcattgtcagggctgttggcagggacatcccaggagagctaggtcattgtcatcttttctgtgtgaactgggtaaaggactgcctttcccagaaccttcatctgtagacacccctcaagggctttgaggggctcctgtaaaataaagtctttaagagcctgaggaatgttccgtccccttgcacagagagcgagctgaggagcctcagaaccagtcacgttggcagaggctgctttccaagaatccctggcttctagaacaggtggtgtggcctctagctgagaggttcaacccattgagggtgacaggttatggggccctcctgtctgtattgcttgcttgccttcttgctgtgacaaacagtgcaacaaaagcaattcatagaagcaaaggtttgttttagctcggtgtagtctggcatggcagaggggcacgttacagccgcagtcaggaagcagagggatggccagagctgctcttccgctggtcttctccatttcacgcagtcttggacttcacatgtgggaccttgttgcccatgttccggagcccatgtttnnnnnnnnnnnnnnnnnnnnnnnnnnnnnnnnnnnnnnnnnnnnnnnnnnnnnnnnnnnnnnnnnnnnnnnnnnnnnnnnnnnnnnnnnnnnnnggccttgggggtataccagcagagaccgaaggccacacaatgggcccgtgtgaggaatgttccactaggctctgagagtcggtcccagaacccagagaaatggacaaggcatttctgggggctcagggggacagggtctacacacaccaggagtgtcaggcaggtagctgtcaacactgtacatgtgtacagttctgagctagatccctgggccaaggctggcttgaccaagtagtctaagatgacatctctgtgcggttcctagggctcacttgcagagaagatggaatttgtagtcaggcggcagcagccagtgagcagagctactatgggagtcctgaggcctgaagggcttgtggggggtggggagcttagagagagggtccagtgtgagcttgggggggggtagtatgtgagaaggcattgaccatccgttggttaccccttttcaacactcaaggggccatgtaacacacaaagggccatgtagctagaatgtgtagggaggcagaaaggctcagctctgttgctagaaagagagaaatacagaggtctgtttagctgtgtgaccagagacaggttggggacaatgctctgtcttgatgtttgttctttcttatctatctatcattgatatatatatatatatatatatatatatatatatatatatatatggtctgtctgctgtctgtttagccaaggctgtcctagaactcactatgcagattgggctttaaactttgtgtgtgtgtgtgtgtgtgtgtgtgtgtgtgtgtgtggtgtgttactatgcccttgtagagattagaggacagctttgtgaatccagttctcttctcccacctttacttgggttctggggatcaaactcaggccatcagactggcctggcaaggactttagctgctgagccattttgttagactcctgtactttaattttctttgctcttgaaaggaggtgatgattgcatctcagaggtgttggcgtagataggatgaaccttgcaggatgtctcatgagataccacgatcgcagcccccttagctttccttcacctttctgggttcttggaacaacccagtgatctgggtaggatggggatgctatcccattttacagatagaaatactgaggcttgagaggggaagggagtgacttgtttgctgccaccttttatatctgtgcctgtttcatggagagaacagtacctatcatgtatttccctttttttccagaagggactttctcagctagagacatacgtgtgtcttgacctgcaagagaaatcaatatttgctttgtgagtagaggaacacagccttggcagagggagtctgtttttccgtgttacagcctttccgcttcctgcccaggacagctgcgtgcatcagaatgggcactgccggtgtcccaggatggtcacatggcctttctttgctgattcccagtaattagcagagagccggtgctctaggctctccagctacaccaggtacagcgtggaaccctcagtcatggctgaagtcagagtcacagctgactctggtgtgtgtcctcttgctatgccaggaccctgtgcaggcagaaggaacagtgtggcgggtgggtgcccagttcagagcagtcgctgggtgcagtggagcggagtgctctcttctgagactgggtcacttaccaaggctagcagacttaccttctccttgctaggaggcctcctgcccttagaggtttctcagatccacacagccacgcccatcgtgattgctgctgacttgggtggatctggggtgcacgaggagtagaccttgccactttcggttaaggtcacatttacattcacaagttccagggcgtggggccaacttctccaggtgaaatttttttttttctttttttggtgcttctgaaacagcagttttctctgtagtccaggctagccttgacatttcgggaatcctcctgcctctgcttccttagggttgggagcacaggtaagcacagttgcttccaggtaattctgatatgtgcctaacccgtgtctctcgatcacttctctgcttggctccgactcggcctttgacccgggaggcactgctgttggtctcgtgacgagctgcaggacaggtgagcctggctgagctgtatagcagcatgctgagacagctgtggtcttgggtgactcgagtggggccagtagaggccctggcagttggcttctcggaagccctgatgtctggcggatcatttatcacagccacctcccaactcctaacatccctgggagatacatctaaaagaatttttttaaagcagggacttgtatcttagggttttattgctatgaatagacaccatgaccaaggcaattcttacaaaggaaaacatttaattggggctggcttacaggttcagaggtttggttcattatcatcatggcaggaagcatggcagtacgcagtcaggcatggtaccggagaaggagctgagagttctacatcttgatcaaaggcagcagccagagtctctgagccactctgagtgtagcttgagcctaggaaatctcgaagaccaccctccagggcgacacccactccaacagggccacaactcctaatagtgccactccctgtggccaagcattcaaaaatctctgggggccaaacctactgaaaccattaccccaggctaccctggaattggctatgtagccgaggatgaccttgacttcccgatcctcctgcttctgcttcctgagtattgagatcaaaagtgggtatccctgtgtccatctgtctgatcctcttgcatactagggaaacaccctgccaatggagctccgtcctcagccccctaagctaggccttctgcagccaggaaacccccctgtgcctcccggacctggtatcttctcaggtccacatcctcttcctttgtctccttggagctaacaatgaagagctcttccgcctgtcgctcccagctcagtcgcttactagacatgcttgcctttgcaggccccagggagcagctgtttgttcctgccctgttcctgtgagtgtgtgcggctctgacaggactgttggttggctggctggctacctagtgtctgctgcaggtagcctcttttgttctgcgtttctttcttcgaggtcatcctggcttgatggctttagtcatcaaacgtttctttggcgtctgggagttttggatcctctggaggcttgactggaagaagctgggtgctggaataggggtggtggctctaccagggaagtacactgaccatggtccagtgtgggaaaggaaggagtgggcagagccctagtgactgaggttccccggtctgggtcccatcaggctccctggagttgcaagaagcagaagtagaaccagctttactgtcatgaaaatggttcttttttctttttctattttttttttttcttgagaggatatgccagggcgtgagaactcatattcctgaggaggaagggcagccttcggtggagacagttggcctgggagtcgggagaactgggtcacagctgctgaccagtggttaattcactgtgtgacactgtgggggagtgatcactgtgcctcagattgccatctgcacaataagggggttgggcagccaggatctgcctgcttatctcaggaggtcacagcacggtcttgtggtccatctgtgtattaagagcagtgtttgttactgaaaataattaagaggctggagggatggcgcagtgggtaagggagcttgctgctcttccagagggcccaggttcaattcccagtatccacactgggtagctcattagtacaggctataactccagctccagggtgtctgtcattctcttctgggtacggcatgtatgtagtgtgcatacattacattcagatacatacacatcaaacaaacattttttttaaagaaaataagaaccttgaatgtttgattttataggtgctggttgggttaggtctgggactgttcagagaagacaccattttaaagaaaaatcttatccagcagggtggttcatacctgtgatcccagcactctagaagctgggaagacaggattaccaactcaagccaggccggggtacagagagaaagcccctgtctcaaaacaaagataaggtgaagaagtaacacacacacacacacacacacacacacacacacacacacaggcaaaggcacgtagacataggcacacaatacatacacagagacatagacacacacacacaggcataggcacatagacataggcacacaatacatacacagagacatagacacacacagagagacagacatagacacacacgtacacacagagagacatagacacatacatacatacagacagacatagatacacatgtatacacacagagacatagacacttacacacagacagacaggcatagacacaccgagaaacatagatagataccccacacatgcacacacgtgagcgcgcgcgcacacacacacacacacacccctaattgataagtctaagcagcacatgccaatccaagtccaagcgtgcacaaggtagggggccagtggacttgggacacatggaaatccccactgactggtttctggctcttctggagactcttgtcattgtgccaccttgttctgaaagagtcaggattcttaccagtaggtcacagttcacaaagaaggctggccatctcagaggagccttggagtgaccattgcatttgtattttagagtggagaagaagaacagagctcagagagggccctggttttcccagcgccccagagcctctaagtaatgtgggcttctgctatcaggctcagagcagctctgtctggagggtggggggggggggttgggtagtgttctcaacggtctcttcttatcttctgaagcgggattttacactgtggcacagctcctgccccacctcagccccccaagcaataggatatgcaggtgtgagccaccacacctgccttgtgtttgtttttcattttctcaaagctgaggaggaaggattaagatgccaggcgtctcctctctgttccccatccccaaccccttggcctcctacttatctctatctctctctgacttttctaaagcccccagtgtcttgttttctagctcagtgtgtaagagggaagttcccgttatagtctgtacttagctccaattagcagttggtgaagtctccagtttagccattaatttgggagcagaagaggccacccacctccggctcctggctgtcttccctgacacttccctgccaatgctaccttgtatgctatgaggcctgagacttgcaacaggcttcctggagagcatggggcatggtttgttcgttctctctctctctctctctctctctctctctctctctctctctttctttctttctttcttttgttttttgagacagggtttctctgtataggcctggctgtcctggaactcactctgtagaccaggctggccttgaactcagaaatccgcctgcctctgcctcctaagtgctgggattaaagacgtgcgccaccactgcccggctattttttatttttattttttggtttttcaagacagggttgctttctatagccttggttatcctagaactagctcagtagtccaggctggccttgaactcacagagatctacctactgctgcctcccaagtatgaggatcaaagacatgcttattttttgagtcaggggctctctctataatcttaactgttctgaaaattgttatatagacctggctagtctcaaactcacagagatcctcctgtctctgcctcccaagtgctgggattcaaggtgtgcatcactatggctgacctccagggtgtattttaaaatcttcttgggtcaaaggatacccctttcaggtccacattaaaactgcagctcacagctgtctttaactcctgtttgaggggatctgacaccctcacacagacataaatgcaatcaaaacactaatgtgtataaaacaaagaaataattttaaaaggtgctccaattgtatctaaaacgtttctcagacattaaaaaaagaaaaacctggccaggcagtggtggtgcacgcctttaatcctagcacttgagaggcagaggcaagcggatttctgagttcgaggccagcctggtctacaaagtgagttccaggacagccaggactatacagagaaaccctgtctcaaaaaaactcaaaacccatagtccctgtactataacttttgacccaagggtcgcagagcatctggaaactcacagaccttcagatcattcctatgcacattcgaggtctctgccctctgcccagagcaaacagccacctctttgtcttgtcgtctgtcttactttgggtcttattgctgtgaagagacaccatgaccacaataactcttataaaggaaaacacttaattggggctggctgacaggttcagaggtttagttcataatcattatggcaggaaacatggcagcgtgcaggcagacatggtgctggaggagtcaagaatggttcatcttgatccgcaggcaactgagggagaccatcattggcatagcatagtacctcaaagcccgcctccacaatagcacacttcctctaccaaggccacacccactccaccaaggccacacactccctatgggccaagcattcaaacaaatgagtctatggggccatttctattcaaaacaccgcagctcccaagtcatgatacctgatcagctacaaatttttaggcccgggggtcctgcttggatgctcctccgaggaagctcgggccctctcttcacccaaatgccaccatccctgattacagtagataattggctcctcttactgtgacatttaagtaagctccttagcctgtcatgttgagaatagagaggggtgcagagggaggccacttaggagctcaccgaggtgataccctacctatttagtcccagtgcctggcacacggtggcctggttgatggatgtagaatggaccataggatgtgtcgtagttatttttcttttgctgtgaagagacaccatcaccaaagcaacgtagaaagggaagaatttatgctgggcctctggttccggagggttagagtccatgacggaagactggagggggtgttctgcacgggggagtcacagctgagcagctcacatctcaatctacaagtcttctgaaaccccaaggcttgcctcttccagtgatgaacttcgtccagcaaggccacacctcctaatcctccccaaatacccaccaagtggggatcaagtattcaaatgtctgagacttgctggagtgtttccttgaagtccacaggactcttccctccctctggaaggtaaccttggatcaaagtggctgtcatgaaaaggtggttggtttttctgtttgttatttgttttctgacatcagaattaggttttgagatgtgtgcctaacagtgacccctgtgtgagctacaggaaggaagtaacattattgaacacctgctgggggcccagaactttggagagtccttttgcattgtggtcacttggtcattgtaagctgatttgactaatcgccttggcttttgtggtaagagcgtggtatgtggagaagccattcaacgtcctgtccatagatgtttgggtctttttagtacatttgtgataatgtgctatgtcgaggtcacagttggtaagtggtgctggctcctgccaccaggccatgcacatatctatggactgtcttagtcagggtttctattcctgcacaaacatcatgaccaagaagcaagttggggaggaaagggtttattcggcttacacttccatactgctgttcatcaccaaggaagtcaggactggaactcaagcaggtcaggaagcaggagctgatgcagaggccatggagggatgttctttactagcctgcctctcctggcttactcagcctgctctcttatagaacccaagactaccagcccagagatgtcaccacccacaaggggcctttcccccttgatcactaattgagaaaatgcctcacagttggatctcatggaggcatttcctcaactgaagctcctttctctgtgataactacagctgtgtcaagttgacacaaaactagccagtacagtaagtatggttcatattgccaccagtgagggcttcctgttgttgcttttgtagccgttgagaagagcagagagatcccttttacccagtgaactgtaaggcattcccaggagaggagcgctctgagctgagcattacaaataagtaaatagaatgatttgggttgttttgtttttttctttttctagacaaggctagccttgaacttctgatccatatttggatttttgcaggtttagggattaaactcagggcctcgtgcatgctaggcgagcattctgccaactgagctacatccctaagtcttgttgactgtttgtttctggctgtctggatgccctgggctgtaggggaaggcagtcatgggtggggtgagaaggaagaaggttgagccccggagactgtcagcagatctcccccaccctgtaaggctctcatcccttgggtctctaagctcctatcccagaattccctattctctcctaccatcagtacaactctgtccctgcatctgagtgctcctgcagtggcctgagtcggggattttcgatccccagggtcagatgtacgggggtgggggtggggggggaaccgcagggaacatggccttgtgctctgttgggctcttggcaatgagctatcaaggctgaccagaagtaggtccttggcagccaccgttatccaaggaccatggagatggttccagggaagcagggcagagagggttagagagagctggtgtgtgtgtgtgtgtgtgtgtgtgtgtgtgtgtaggtgtaggtgtggttatgtgtgtgtgtaagagagagagagacacggggggggggtgttaggggaaatggagggcagggggtggggaaggaggggaaggtgacttacttttgcccctcccctccctcccataaccacctccgtgatttttcacatactcttctgttcagaaggggattctgtggagggccttattccagaagcatctcaggctatgtcagctctcagatttaccctcccaggtgcataactcagcgcctccttccaggcttactgcagtggaccctccctggactcccaaggacaaagaaatggctgcgtcttgtctcagtatgcggttgggttcttatgactcccacctgtctgtctgggctacactttgttgtatggctgtgatggttcttgattagaaattccactctgccctggctggactgaataactggtttcacaaacctcccagtctctctccctcgctgtctggaatgcgttgtgcgcgtggggagtctttgaaatcaactttctgccaacaggagggtagaaaatgatgtttaccttgcctcctaggcgggcctgttttgtgactgccatggctcccacccctgggccaattcaggaaggctacaaaatgccccctgaagattttatccagcgcaggaaagcctgagcgaggaaaagaaccctattcctaaataagactcgcataaagaaaacccacaagccaggcagagttgcaggatgctccaaagggaggcaggctaacatggggaccagcttcgatacccgcaccctggcctgcacggatctgcacagtgaagtgaggctccccctccctaagagtcaccaatagctgcccctttgagaaaagtttctacttaaatttctaggtaagggaatatgggggtgggggcggggcatggatctggcctgaactggttttgagtgcattcacagtgagtgaaactgtgttctcctaggaaacttttaggaaacgtcccctacttgcagtcttatgcatatttcggtgtgcatatgtgctgtgggaaaggacatttgccgtgagtagaagcatatatatatatatatatatatgccaagcctgtcagtcacctgggctgctcctcttagcaaccaagctccttctcttggatcccatcaaaggatgcctcaaaggaaagccagggcctttgagagccatttgattcaggtggcccactgtgtagtgtgacagtgtggctggtgtcttctatcacttggcttctgaacgacatttccttgctgctttgctggctctttttcttttttctttttctttttctttttctttttcttttttgcttttatttcaatcatttgattaagatgctaaaatcccagaatcacctgatcttgatgtaacactagtaacagaagttcagggagggtcttccatggagttagcaccaggccagcctgggccacatgacactctgcctttaaaaaaggagcctgtggcgatagatcagtggttaagggcaccggctgctcttcagaggacctatggtcagcatgcacattgcagctcacaaccatctataactccagccccggaggatctgactccctcttctggcttccttgggtgtcagacacataaatagtacacagacacacatgtagacaagcacatacatgcataaaaaagatgctctgttacggcagcgggctttattttactatctgacagtgtcataggaatcagagtaaggatgcacccacaccaaggcaggcccagaaagctagctcctgtctcctgcctctgaccggtccttcctgctctgtacggctgggacagaggcatggggagacatgctgtaatccatcagtgaccatcaccagtactgttaagtcgcctccatttgtaagcctggagagtatattgcaattagaggcagtgttagtccacgccacagtactgtaacaagttacctgagctaattaacgtggaaggggaaaggttcatttgggctcactgttttgggacctctgggccgtgatctaatgacttggtccacctcctcaaggctccaccagctcccagcagccccaccctggggagcaagcctttattacaagagttttataccctgagagacactcagggttaaaaaaaaaaaaagacatgactttccctgcagcccagtgttccagagactccctgaatccatccatgggacagacatttgctccctatctgattttgagtccttgtggcctgggtgaagcctggcagtttacctgggacacagcaggagcttgtaatgtggattagggttggaagaagacctcatagactcctttaagtggaaggctgttccaggtgggatgagctagccaggcaccaaccagatgcatcctgaggacctacaggtgctgggcaccacacaggatggcccgtttcccggcagctttgtatagctgggcctggctctgcccatgagaaagctgagctccaggctggttctgaaaagacccagttcatcttggacaacagaagggcaaagaggcagcttggtcctacagcctaaggcctagccacagactgccggcgtcacgttcatttcccaccgtattccagctgtgtgtggccccatgcccctaccctatgcctgtttagctgaagccgtccagtttgacaaatgatctgtttgcttcctgcactggagctggggaggctggctgcctggggcagggctataattagcgaaggaggggaccggattgcacgatgtcattgactgatgactttatacccagatgggtgaattgatgtcatcagagatgtaaatatcacttggaaaatgttaaattcccaggaagattcatgccagcttcttgtcctgatcagcaatgctccgaacacctgctcagggaccctgggttagcctgtgctgggttagcctgtgctggtgtgaggacagtgtgaagggtcactttgaccttgagggatgggtctatgatggtgaggtgtatggtagtgagggagttaggatgcctgggctttctggtctgctgtggaaattttgcccagggtttggaggccaggagctcttgcgactggctagccctagcaaggagatagtaatggtgtttgagggggtttgggggtggggcagggggatgcaatcagaccaaaggaagtttggttttactggcagcaggactgtcctggagtggtcccagggctccaaggagcttgtaaaaataaaagaatccacccattgtccttctgccgagggctgagatgggctgtgtatgaaactgtcccgcagctctgggatttaagggatgggtttaaaggccaagcagaagcagagagtcaggcgggagagaggggtggggacaagcctggggtctggaagtgggtaggagggcagccagcagaggggagataccaggacccagagcccatcctgtaggaaagaggaaagctttaggaccacgaagcttacaaccttgcagaacatggaatcaatcctgaaaatactaacgtggatgggctgtacagtttggctacaagatgagactcaaactttccccccacagactccatgaagccccaccccctcctcccctcaagaacactgggtccccacctatttgatcgcctcaatgcctggactctgatgatgcctgggctctgtggaatggcaccatctatggtggtgtgaaggtttgattccccagtctatggactgtttaggaaggattagggggtgtggccctgttggagtaggagtgacactgggagacaggctttgagggtccagaagcccatgccaagcctagcctcactctcttcccgtgaagtgcatccacaggtccgaggtgcgggtgtctcgggctgacccacacagggttagggtgcagtgagcagcccgtgggtgtggagtcattcgggcaggtggctttttcagcaggtgctcaactgctgagttatatctccagccacttcagacctttttttcttaagtcagagattcatgtagtccatgacctcaaacttgctttatagccctggatcccatctcttcctgtctcttagcttcccactgttgggagagagctggacttacctcttcttcttcttcttcttcttcttcttctccttctccttctccttctccttctccttctccttctccttctccttctccttctccttctccttctccttccccttccccttccccttccccttccccttccccttctccttctccttctccttnnnnnnnnnnnnnnnnnnnnnnnnnnnnnnnnnnnnnnnnnnnnnnnnnnnnnnnnnnnnnnnnnnnnnnnnnnnnnnnnnnnnnnnnnnnnnnnnnnnnnnnnnnnnnnnnnnnnnnnnnnnnnnnnnnnnnnnnnnnnnnnnnnnnnnnnnnnnnnnnnnnnnnnnnnnnnnnnnnnnnnnnnnnnnnnnnnnnnnnnnnnnnnnnnnnnnnnnnnnnnnnnnnnnnnnnnnnnnnnnnnnnnnnnnnnnnnnnnnnnnnnnnnnnnnnnnnnnnnnnnnnnnnnnnnnnnnnnnnnnnnnnnnnnnnnnnnnnnnnnnnnnnnnnnnnnnnnnnnnnnnnnnnnnnnnnnnnnnnnnnnnnnnnnnnnnnnnnnnnnnnnnnnnnnnnnnnnnnnnnnnnnnnnnnnnnnnnnnnnnnntcctcctcctcttcctcctcctcctcctcctcctcctcttcttcttcttcttcttcttcttcttcttcttcttcttcttcttcttcttcttcttcatcttcctcctcctcttcttctcctcctccctcctcctcctctttcttctttcttctctcttctcttttctccctctcccactccctcttgtgctctctcgcttgcgctctctctctctctctctctctctctctctctctctctctctctcttgggtctcatgaagcccaggctgtacttgtttgcatccctttgcccagagtttcccttacctgctcatacagaactgccagctgtttccctccatgctgtcagccctcctggtcatgtataccacagagaccttctttctagacgaggaggtgggtctcagaaaaccaggatgtggcaagtctttgcaaaccaggaagactcagcttcaaatcgaagaggactctggatccaagagagctggttttctggtgatcatcccatcagctgcttctgtgtcttagaggtgtggctcctggccatgcttgtcacttctctgagctcaggcggaagcaggcacatcccttaacacaggatagccttggcactatgtgaggttaccataggctataaggagcctcttatggccactgaaaggctggaagtcattgtggagcagcctctgtgcttctgagtgcttgctgagtcgccagcgtagctcgctaacactgttagtgatttccctcatttctctcactttggacatggcttctgttattcctccttactgcttgctgtggactggaaaagttcataaagctagtggtcgttccctgcccttcagaattcagctctggtgccagaatccttagttgtgcagacttgggggaagtgatgtctgaccttgaagtctgtgggaaagtgcagcctatgttcttttgcagacatggggtatagatactgaccaggcttcttcagtgacagtgtgtgtgtgtgtgtgtgtgtgtgtgtgtgtgtgtgtgtgtgtgtgtactctgaactgtcaaaatctacctgtcctggaattatgtttagggaggtgtgttagtttgggtttccattgctgtgaagagacaccatgatcaaggcaactctttttttttttaaagatttatttatttatttatttatttatttatttattatatgtaagtacactgtagctgtcttcagacactccagaagagggtgtcagatgtttgtgagccaccatgtggttgctgggatttgaactcaggatcaaggcaactcttacaaaggaaaacatttaattgggactggtttatagttccagaggtccagtctgttatcataccaggaagcatggcagcatccaggcaggcatgatgctggagaaggagctgagagttctacatcttgatctgaaagcagccaggaggactgtcttcttctataggcagcgaggagaagggtttcttccgtcctgggcagagcttacataggacctcaaagcccacccccacactttctccaacaaggccacacctcctaaatgccactctctgggccaggtgtattcaaaccaccacagggggtaaataaaggccggtgaggtagctctctggatcagagtgcctgccatgaacctgtttacctgagttccgtattcagttctcgcatggtggaagttgtcttctggcttccacaggctgcctttctccccaagtaagtagataaatgtaatgcaaagttttaaaaataatgtctatttaatactaataagcacaaatcccagagtgatggtgcatgcagtcatcccagtacttgggagacagaggtggggagattagcagtttaaggtctttctgggctacacagcaagttcaaggccagcctgggctacgtgagattgtatatcaacaaaacaaacaaatgaaataactccctccaacatactcataagcacaaaaggagaaaaaaataagccaggagaagtttcatggggaaagatctccctatcataaaacaaacaaacaaacaacccttttatgatgtgtgtgtagggttagggagggagagaaaatgggagaacgtctctaatgtaggctgacctggaaccctcccacttagcttcctgggaggtaaagatcacaagcatgtagaccagagcagttggggattttcagcgtttaatactgtggctccccaaggcttcacgagactcataacaaccgaacacactcagagaagggtttgggggatcgtgccctgggatgtcagggggaagctaaggaggatcagaaggccatgtggtaagcccgtgtggctaaaatgtgtaccatgtctcagtgttaaaatgctagtaagtagagagagagagtgtacctcaatcccctagaaatctctcctgtcctgttctgaccttcagtcttctcaacagtcattccgaagggaaattcctcccttcctttgtgattttataccgagtgaagtgtctgtctctgaacagctgggaaacgtccctggggcggcatgcctgttgagtatgcatgtcggtgacactgtgccccgtgtttctagaacgtccatctttatcatctcataagacctgtcaacaagctgtggggtgagcaggaacggaatgagtgtgttcatacccattactcagatgagaatgtagactcctggtgaatgtctgtcccggagcggagactcatgttctctgactctgcgggcagtggcatatccctggtccatgagcgctgtcctctatagttagtacctgtcttcaggggcttttatagcacaccaccacagagttccccttcctcacagtctgtgggtcagagcctaagattaagttctggtgagttccaagccctctcccgggctcgcagggggatgtctgccttatgcatcttcctgtgcccttccttctgtatgtgtctctgtaataatctcactatttccttctcattcctcttcagacagggtcttatgtatcccaggctggcctcaagcctgaatggaaccagaggggacttctgctcttaattggccagtgcataaaccaccacccggcttatgcagcgctgggaattgaacccaggacatctgcagcacttgactaactgagctattctcccagcctgtaatttcttacaacgacagcactcaatatggattagagccacgttcgtgactcactctatctatctatctatctatctatctatctatctatctatctatctatctatgggagacagggtctcatgtaggccagctgtcctgaaattcatgtgtggatggttttgaacttctgatcttcctgaccccacttctcagtgctggggctataggcatacaccactgctcctagtttatgctcagcagtggacagaggaggacctcctgcatgccaggcaagcatgctccaatggaactatcacacctccatgggccctcaccttctatttctcttgcagctgattgggggcctggtcctgtcagtggggatctacgcagaggcagagcggcagaaatacaaaaccctggagagtgccttcctggcccccgccatcatcctcatcctcctgggggtggtcatgttcatcgtctccttcatcggggtgctggcttccctccgggacaacctgtgccttctgcagtcggtaagtggctcctcccaaccctcatggtacatagggagtggttcttgctgtctctgagaaagctgaagagctgtccctctcccctggccagttcaattccttctgcctcttacacagtccagccaccctagaacatttcctgaaccaggagtcattggagcacagtggtccaggtctgccccacctgtaaacatcagcgggtgcagctgacttgaatactgctgtcacagagatgctgggatctctgtgctctcggttgtcatgggagaaatggcagtcagctgcaagcaagcaaagccagggggtgggggtggggtgtgatgaatcatcaggctcgcgcagccagggatgctaacagcaccaatgggccaggctgggcagcctgtttgccactgcctgctacccctggtcatccttgggctcagagtctttattgctgagctaagggcatctttcttggacactctggtcggagtcccagtacactggaggacctggctcggatcacatgtccgtcaggtggatagtcttagtcaacacaactcatctatacctgagggacaacaccccaatgctggggacccggagtgtgaagactcacttcctctgttatctgagaggatacctttatagtcacacaagcaggatcttggtactgcccaaggctggaagttgctagaatatatttggtcagtatctattaacccggggtgctgcggtgggcagggtagatgggtggttcccatagagtaactaaagagatgaggttgggtgacttgggaagcctaggccatgaggctctgcgtcatgaaaagggactgggcgggctgagaggcaggaggaacctctgggcagggtaagggaatggagtgtgtgtccccaaacctcagagaccccttctatacttggttgactgggaaacctcttctgagctgttagggctgttgtggggagtcagggactggaagtggtgcccaggcctgtttcctctggcgtgttagagggaggaagagcccactgttcatctagacctcactgaggacccctggggaaatcacgagaggcagctcagtcagtctctagcttcaaggcttctctagcacagccctaggagtggcggcaagacccagtcagggagggctagtgccttattatctcagcacaggtggggggtcccttgagccctcccacaaacccccaaatgaatctcttcaccttgttttacagtttatgtatatcctggggatctgcctggtcatggagcttattggtggcatagtggctttgatcttccggaaccaggtaggcctgtgggttcatcatcggccatatgtgtaccaagatcccagtgggtatgctctgggctgtacccagggtgctgccgtgggcagggtagacagatggttttcttaagaagagggttgggtaaactaggatagcccgggccatgcagctctgcatcatgctaagtggctaggagggcagaggtgggcagagcctctgggcaggttggcagaagaatgtgggtggggggatctactggactagtagggtgaggtgtggaggggaagatggaaggcggggttggatggctggctccggggtgtacgttggacctcagaggccaagggttaggtgccctgagtgactttgaaaggcagtgagttgttagagatgtatgcaaggaagggctttgcctgactcacgtccgtctcactctagcagccgagtggagaacaggcagtaggaagtaagggtgacatgggaggctgtgacagtcacccagagaagacataatggcggctcagatggaagtgaagactaatgtccccagaccacagacggtggtgtttgatgcatgttttagacatgtacatatgattgaggggagggacagcttgagtgacatccaagacccagcagtgttggtgaaatgaggacccccatagcggggcacaagtctcagagctccaggacctcaatgtatggttcagacctgcgtgacttaatacggttcctcgtgttatggagagtcgcctcaccataaagttagttttgttgacacatcataactgtaattttgttagttatacatcataatgtgaatatttttttggagatagaggtttgtcaaaggggttgcagcccataggttgagaggcgctctactagacccttcttggcatttcttatccaggatcccattagtgatggtgtagagctgtcttctgacttagggatgctgggatggaacccaagaccttgcacatgctaggcaagagctctactgttgctgcacacagagattccttctgtaatcttcttcttctgcctttttcctccttgggtggtgttatgggtagggcttgagcaagctcattgcagaagtctaggtctcctgtccacctccctgaccttaccctgcaggtccctgacatcttggtccctggccttctgggaactgtcaagactgtgcctcagcaggagacagaggcaggcagatctttgtgagtttggggtcagcctggtctacatagccatttccaggacagacagggctatgtagagagaccctgtctcaaggcaacatgactgtgtctcaggctacaggcaaatcatgctagaaactcgttgaaagttgatcccaagtcaccaattggtgtctgacaccttcagagaacaccatgtctgatccctggtacagcctgcatgagaatggtggttttctgacccaggagagaacatgaatagtgggacccaaccctgggcaagtctgacctactgaggacctcagggtctgcttcctagtgggtgatttccaaggctttcacgggagagggaaagtgggacagttcccattgtattgatggagagtcagcagtgctccctgcccccccccgtgtgtgtgtgtgtgtgtgtgcacctgtggtttgttttctgagataggacctctatagtttgatggctatgtaacaaagatgaccttggttgtagagattggacctacagttgtagaaattttttcatcccaagccagggtttctaccacttagttcctggataaaagacacatacaacctctatatttacaataagctttgatcagcacaagagctgggcagatctaccctctatgctattagaatctactttcctactgataaccccaagttattacttactatgttaactccagttggccagcccttggtgccatgttttcataactcctaaacacatggcatctctctgttccttcttccctttcttcccctttatggttctcctcagacccccaagcccagggatcctaaaccccgcctatgtctctcctgtccagctattggctatcagcatctttctccaccaatcagaaataacttggaggcaagtttacaaagcatcacttggatctatagactttcttgtctctagggcagcaaccagggtttgggggcctgtacttagcattacaataatacatagcaaaagacctcaacagcctactgcctgcatcttccaagagctgggattagcagtgtgtaccacccataccccagacccttaaattgtttgtttgtttgtttgtttttcctgcttctcagaccatctactctgagctggcaggaatgaggtattggttcatttcccagaagccttaaggagagagaggtatttattgcagttgtatatagcgatgcttttgtgtgtgaacagctctcagttagccagtggccttgcaggggtctaggttagcactttcctgccacagccccggggctagctcatggtcagcaccattcatggctttaataaacctgctcctaccaaatgagctggtcctggttcctgtgtgcctctccaaggctttcagatttgtcatatttcagtgctctgtagttcatttggggccatgacatagcttccttcttttagatggggaggctgagctgagtgctttggagcctcttgggaccttcaggaagccagggcctggtcacaaatgactttcctgttattcccacaccctctgggcctcatgacccctgaaatgtgtgcttcacagtgtgtgggggaagttcaaggctatccctcaactacttagtacgtttgaggctacctcagctaccaaaaccctgtctcaaaactaagcatgccaaagaccaggtgtggtttaattccagtactcaggaagcagaggcaggtggatctctgtgagtttgaaaccagccttggctacacaatgagttccagaacagccaaggctatgtggacagactctcaaaaaaacagaccaaccaaacaacaacaacaaaaccccaatgtcaaagccatagtaaacaatgcagaagaggtgtttgggagaaggtggaggcagctcccagcacctccctcagtgtcccatcctccaggacatttcctgttcagctcttcaaacttccactgaatcattatggagaccactgctgatgaacctgtctgaagatgcttcagcattctctcataggtttgccgcaggaccctctggagtgagcttacagataagggtggctcagagcagatctttgtggcctcccgaactgggaaagatgagaattagaacctatcgggttttttgtttgcttgttctttttgttttggttatgtttttttgttttttgtttgtttgttgttttgttttgtttttggccatccttggagaatagggtcatgagcaaggaatcaagaagaaaagaaagcaaacatataaagtagtgacacatgcctgtaatcccaggcctagggggactgaggcaggagcattgctgagagtttgaactatgtactgagtactaggttagccagaggtatacagcaagatactatctatctaaaaaaaaaaaaaaaccacagtatattcatcataacatttaaagttgttagaatacagcaggcatagtgatgcacacctataatcccagaccttgagaggctgaggcaggaggattgcaactttgaggcctatgtaggttacaaagtaaatccctatttttaaaaaaaaatttaaaagaaagacctgaagctgggcatgtggtggatgcctttaaccccagcacgtgggaagcagaagcaggcagaccgctgaggtcaaggtcagcctagtccatagagtgagttccaggacagccagggctacccagagaaaccctgtcacagaaaacaaaacaaaacaaaacaaaacaaaaaacaatctggagagaaatttctggaagctgaggaatatggtgcattggtttattctctcctttagatatatttttttctagattccaaatttctctctctctttctcttttggtgatatctggaaatgccacattaagcaacaacaaaagcagcagcaaccacaaaaacaaactgttatgcttgcctcttctggcgctaatgcaatgtgattttgtaagacaggagccaggcctgtgctgggcatgagggaaggagaagctactggaagctactgggtgggggaggtgtcagcgaggatgagaaggaggagggaaggagagaagaggaggggaggaggagggggaagagggagaagagggtacccaagtgaagtgctctccaggaaaaggcaggtttctttagccgtcgtagaacagtcagtgtccagcaccatgggcctgcctgttcattctgacagtgtgctttgtggtgacagtactagtcaccaggctaggctctcggggagcagcctgacgtggctgaggccagttagtgagaggtagatgcttgggtgtgagaagcaactgtgtccctgagccaggtgaggcagctgcaagcagggggacccagccaccagagcccagtggctcctcggtctatgcacgtgtggtgcgtggtgaggggtcaactggggggcagcagaaaaatgctcagtgccttgaccccgggcatgggcatgggacttggtgacctcagaacctgagctggattctccatacttattgctgtcctagcttaccccgggtttcatcatgagggtatcaggggtgtcggaggtgacaaaactgagcagaaacaccagagggccttggcattagctggtaggtctcccaggcctcgtgccacttctcccaatagaaacaaggtgactgcaagccactttctgtcttgatcagaggatgtcttggtcattcctgatgccaggtcagagactggcaggcagcaccaacttggttatcttacctggtatagcattactagccagcacttaggatgccttgaacccaggggcaggagaaagctggtagttcctcagccccccttggctaagcacccgaacatatacatcctctcccgcacagcctgaggtcccagaaactttgcgcagcctgcggggacccagagtaattctatccccagaggggctggatcctggggcagtcagcctgggagggacacctgtctacgcaggattacactacatgccacattcattgaaaatagtccacggcttctttggggagatgcagaggcgtctgaggctagaaatgcaaaccgaaaggcaaattctggaaagaaaggtctttgtggctttatctggtggcttaacacactttgaaagtcatgtggccttcgatgtttgcttgctctgggtcatgtgtccctccgtggcctgtgacagtggcactagagaaaggcatcttgctagctggagttgctcctgttggtgtgacctggttgagagctttgtctggggacagtggtatggctggcttttaggagcggagttcctaccctatgtgccctgcccccactgggccagatcatctgtaccctgtgtattgtcaagcaagaggttctcctcagagccttcttccccagcagggccaaggcagctcactagatggagatagggtcctcatgggtgtgtgggtctgcctggtctgttggtctgtcttgagtgtagccagcacataccataccatactagttagacttatcaggagtagggaggggggaccagctcccaggccctgttggggttttgtttcccattggtgaaccaaccctggggacctttcagaattaagcattagaggctaagccaagggggaaggaacatcaagtctcatagtcaagggcacagtccccactgccaccggaccccagcatctcttaatctccaagcccccttctctcatccacaaagggaagaagcaaatacagtcagccttctggaggtatccggagtttgaaccccacaaaagtgattgtggatgctggtcacactgtaggtcctggtaacacttgcatctttgcatgtgagnnnnnnnnnnnnnnnnnnnnagagagagagagagagagagagagagagagagagaatatgaatgaatatgaagactccactaccctaccctggccatcctgcccttatccattcctgagggaagagactccctggagatctaaggatggctgggggaggggggtgcggaatggaaggtcagggtgagccaggtctccagccctggtgcctggagagtggaaagtcactgcgcacgccacatttctaccctcctggcctaggcaagaccctaatggtggtgtcacccataagcctagctcagccagcggagcccctacagtgcatcattcaaggctggtgagctcatgccgttgccccactcgggcgggtggcacacagacctcgccctggtgtcctgtttcttattcatccccactccaccccagccatctggcctgtcaccacattcccccagaggcacaggatgtggaggtcaagctgagagctgactggttctgccaaggcagtatggctgacgggtccactcaacccctgccctgacccgtgaagggctggctgtgtgctgatgacctcagagcctctcctagaagcccatggcttctctttccttttgaagtctgtgctgctgctggtcatcatggggtgggaatggggtcctccagacagctcactctgagtattgcgggtctcaggaacaggcagtcacacctgagacttcttagcttgtaatgtagagtgtggcaggcagcagctgggaccttgaccttgaccttggacaagtatattagtctcagggctgcaggtgtctcgggcaagctccaggatgctcacacatgcggggctaccgctcttgcaggaagtcctctgggcaagctgtgagccttaacacctctggggactgaggcttcctctgtgacacctcgagagatctgtttctcacatgcaaagatgcaagtgttaccaggacctacagtgtgaccagcatccacaatcacttttgtggggttcaaactccggatacctccagaaggctgactgtatttgcttcttccctttgtggatgagagaagggggcttggagattaagagatgctggggtccggtggcagtggggactgtgcccttgactatgagacttgatgttccttcccccttggcttagcctctaatgcttaattctgaaaggtccccagggttggttcaccaatgggaaacaaaaccccaacagggcctgggagctggtcccaccacccacaggaattgtctggctactctgtcctgtaccagagccaagaatgcccctttgtgcccagtctctgcctctgctctgaaagcttcaattgtcacaacaagcctgttgctgggctgcccactcacccgccccagcagtgcccgctgtgggctctttgtattccagggatctcagcccagcctgactgggagaggctggcattccagtgctccactcgctcttccgggtggagattggtccctcccaaaccgggtggggactgtgtggcctgagggtcagagcaccaagggatgaagaagggcccatgtagggtgtcagggtacctgggttctagtcctgaccagcctgctctgtgacccagagcaaagtctgtcttcatctctgtttcctctcagttctcacccccatggtcttcttccccccagggactgtttccttctttataaagcaagaggttgggtgatgggagcagagaatgggctggaggaccaatggtcacggctgtcgctaggcaagggagagaaaatgccaggatctgggagggctgaggcctggatccagcatactgcttcagagctggagccaggcggatcagccttgcagggcctggaccttggaagcctgaggagtgaatgtctgtggtgcgggcagtgccaggtgttcagggtggggtatgtcggggaccttctgctcaggtaggtgggaactgttgatctcacctccgtgctaacctggacttctagaataatccaggctggcctctgatgtgtattccttttccttggcaatttttccttccgggtagactattgactttctgaacgacaacatccggagaggaatcgagaattactacgatgatctggacttcaagaacatcatggactttgttcagaagaaggtgaccgggcagcgggggatgaggggaagaggggggacctccaggacccttgccctgaattcaagcctctgttacagagagtggggtgaggggccagctgacctgagcgttcccagtgcaggtggctggtccatggatggccccttcaaacatgggaaaactcacaacaaagccagatgtctctggtcactttacagagccccagggctcaccccctgggtggcaaggatctccctttgggactggctggcctggtgtctagcctgttggacccagttcttctagtgtggagagctttacttcataggtggtgagaatattctctcctaattccagcttcctccactggacaccgaacaagacccctcccttttctctgacacatctttgaatgtgtccataattgtgtgtccccttgagacactgctcctctctccgaggcccagcccagtatgtgggtgaagcagttacagctgcagcaggagccaccctttccctgggcttgcctgcctccctcttagtcccgaggcctggatttcttgtctgcaccacaggagctgactctggtctctccctcttgtagctgagactcccttggtttgtttatgacggtgcttagggcagagccagtgcggtggggtcaccctcattccctggataaggacagtaatggtggagtctggcgattgggtgtgcctggttccctgtgcgagccttcagtggggaccagcctcatcacaccccaggcctttggctctgtgcttctctgtagaagaaacaggtgcagctcctgggagatttgtttgtgccagcaatgtgcctgccagccccggctgggagagccgagtcatactctgggtagatgcttttgttggaaccagcccctagctggctcaggggtttaatttctccttgggtgggggtaggaggtgactcatgttcactgaacctcgtgcagaatgcttcatgcaggactcctcttacagtcagaacccagccaggcgaagttggcattgctctttctagtagataagcatccgaggcccagagagggcaacggccttgcctgtggccaccagctggagcggtgacgtggagatttgaatgtgtattcatctggcagcagaacaaatggcccttgtccaacatagctgatagataggcatttgtggatcctgagtcccgaagggactacagggcactgtggcaacttcagaagggtgcccagattgtgtgtcccagtacctcctacaacaccgatccttcagcctcctaccttggaacacagtcccagagctctgtttgctctggctgatcggtcatttacacatggctgttgttccctggacgcagccttgttccctcacagggcctttgcacgtgcgtgttgactgtcttttccttgttcatgttgcagatgaactgtcctgtcctcccagcagcctttcctgtcctcccagttataaagctatgcccccacctctccacttccctgtgcccagatacacagcatcccttcctaggagatcattcctctcccaaggtggaattggtataatttggggtggtttttttttgggggggtacctcaccctgtatcccaggttgtactagaattcactatgtagtccaggttggcttcaaacttgtattcctgttggcacaccggcctgcttggccatggttcttgtcacttagacagtactcttgtctccccagatgactgtacttagtctatgcagagcccagaaggactgtcccagctagactccaggactgttctctgttcttcccatccaagaagctgacctctgtgcagcgagtagaggtgggaggggagctaaggggagagtctgtggcaggtactcgggtctccaaggtcagggtgaagcagggcttccacaggctctggtctctgaggctgtcttctctagccagtcccctgtctcagggggttgagtcttgaggagaaggtgcagaccagttgccagggacagacatccctcccagagtctagtcaccacctggtgtccaactgaagtgtccagccttactatgtaagctctccagagtggagagctcacccccttcttcatggccatgccgctcttgatagctctgacgtaataaagtatggcctcatggggccctggtgcccccactctggtacctccatccccacctccaccccggacatacacacctcctcagccactgcttcccgctgtatgaccctgaccttggcagtgatcacagctcttccttggtgcttttcccctcagttcaagtgctgtggcggggaggactacagagactggagcaaaaaccagtaccatgactgcagcgcccccgggcccctggcctgcggggtgccctacacctgctgcatcaggaacacggtaactgcatgggtgctggatgtgagggtcacccagtttgccaaacactgctctcactctgcccaagtggagcaggcagtgggagtgggtgggacgtggtggccggggctgagcttgccttagaccaggggccctagcaatgggagatgagtgggcagcttcctctgggagtgtgtcagtgagcgtgtgcgtgtgtgggcctggcccaggcgctttggttgtagttacttggttcttacaacagctttggagggtctcaattggggtagtgttgctttagccacttagggggacttgcccaaggttggcagggctcttcccagcaacagagagccagagtgcccggcaggtgcagcaggctctacccagtcactggaggcagagtacagtgcaggtgctgtgagcactggcagcagagccctgggcagcggcatgcggtaatgtaaatgccagcctccactttccccagtgggagcctctcagctgtcacctcccagtcatctgggatgctgagctgtgaggtcaccgcctgtcagccctgatgtgtgacaagtatgtcaggaactgcccagttttgagactggagcagaaaagcctggcaattacgacacacacgcgcacacactcataacacacaccacacacacacatcacacaaacataacacacacacaccacacacacacataacatagcacacacacaccacacatacaacacacacacacacaacacacaacacagcgcacacaacacagcacacacaccatacatacaccattcatatacatatttactctcctggaaagtctcttgttgatggtttcaacagctgtgcctaccaccccagcctgtaaccatgaaaatggggtacacgtgggtagggcctcacccagagtctggaacatcaccaagtgaaggtgccctgtgagagctggggtcctctgctgctcccctcccttgtcactgcagggacccaggctggatccgggctgggcctgaggttctacctctcccctgtggctgaggttgggaccaagcagggcccacgcagtggtgggcattgtcctggggcctacctgggaaggaatttgatgggggctagagcccagtcattgcgtctccagggataaaagctctggagagcggcccttctttcagagaggaacttctgtggctctttgatggtgaagccagctttgaaggggcaggggagcgtggccagtgacccaaccttgccctcaggtaaaccacagctggcaggggcccagttgtggtttgagcagttcctctctgagagccagtaaaatgggaacagcatggctcagccacggggagccatgggggtgcctccggctaagagcttagactgctgctggtggaggggtgaccctcacatgaacccccagggagggggcctacccatggttcttcactggggcatttcctggaggtggtcactaagatacaggctggagcctgatcctggtggcaggagatctcagctccatctgtacccgccagactgtatacccagcccttggctcttctgtgagcccttcagattacagcctatagaatcgtgaccgatgtgtttctgtttcagacagatgttgtcaacaccatgtgtggctacaaaacaatcgacaaggaggtaacagcctggaaaacctttgtccccagaaatggtgctccctttgttcccagatggtgctcctcttgtccccagaaatggtgctccctttgttcccagatggtgctcctcttgtccccagaagtggtgctccctttgttcccagatggtgctccctttgtcctactcctcagctaatagagggtttctagcagagggctcctggctactcagatttcccagctctccttggctgtcactcacagaaggacccagggagccaggggaggtcatctggccaggtttgctgagtccctgctccaggcaggcttagctgagtgagatatcgtgtccagggctcctcccatgctgcctgcccagccctgcagtttgttgacagctcacactggtactacctgcctgggactcaggaattcctggggaagagaaagtccttgggtggctcccagcctcggctttctggacaagtctatgtagccccgtttgacctgcaattgctatgtagactaggctgcctcaaactcacagagattcccctgcctctgcctcctgagtgagcactaggattaaaggtgggaatcactgtgcccagtcttttttctttcttcttttaataacccagtgggtccgattagtcctactcatgtgttcaagagggtagcgccatccacaaatggcgttgtctttaataatttgtacatggaacaaagtttcaaatgatgatgtttttaataatttgtacatgaaacagtttcatggcaagggattgtccactcgtgggaggagaatgtaacatagtaattctagaagcttcactgtacattaaaaccatgtagggtttccctccacatatacctggagtaggcttttggctcaggtaacagtgcgcagccctgggtggcatctgggaggcatgcaggcacactctgccagttcccagcagttctcaccaccagagcactaccacagtgtccccagtgccatctcgggagcagcactagagaacccagggccaccttcccatgccgctgatcctctccctcctcccgcacagcgcctgaatgcacagaacatcattcacgtgcggggctgcaccaacgccgtgttgatatggttcatggacaactataccatcatggcgggccttttactgggcatcctgcttcctcaggtgggtagtccgtgggtgcagatgaagccaggctgagtgttgaaggagaagggttcagaggctctgggagggctggggtctggaaggagagccaaacagagtagtctcagttgctctctctgcactggctctgcctccagtccgccagtgtggttggtgcgactgataagcacatctgcttagtggcggtagtggaaatggaggattcgaagagtgaagtgactttcccaagggtcccctggataaggtgtggcagagctgggatcgaggcagaagaccagcatagaggggccatgctaatgtacaggggcaggaagtctccacgttcctgggaagggtagagcaggtccagcctggggctgcctgggcagtgggtgctggggtgccttgatttccccagcccagttcccagggagggaactgccatggaaggatgcccatgtgccagcaggctctcaccggctccctctctgtcctcagtttcttggtgtgctgctgaccctactgtacatcacccgtgtggaggacattatcttggagcactctgtcacggatggattgctgggacctggtgccaagtccagaacggacacagcaggcactggatgctgcctgtgctatcccgattagctatgctgattgagctatcctggcccggcacagcagctcccagccggactgtactgcaaagtgcatctaagactacacaagctggacaggaccagctgcagctcctctgcccacccacggcgctgaccaaagcccagggtgtatgtacctgcgtatagtgtctgatggccactcctcctaggggaaagctgaaccctgtgggatcccgggaacagggatagcccagctccggttctgagtcctggagaaggcagctcagggctccgtgtgggctctttttctttctggcagtgccttggccagtggtcattatgccccttcaagggcagttttgcagtgattatttttaaaggcaagaagggagtgtatctgttctatagggaagtcctgggtgcagccctggtacactactctagatgtgacgttggactgtgtctcaaattcccaggtgccttgagtcctctgtaaggctcctgctttgcccacccattttctacatatgttttttttctttttttttttaataaccgtgttttgtatacaattaacaagagtttctggctattcaaaactagccacccctgaccgagtccactcacccctccccgttagttcattaattgaacaataaatatgtgttttggggggtggtcttttatttgtgttgtttggaagtctcttgtcagattgagagaaggctgccccggggtgaagattggtataacttggggcgctggggtcagggagaaagaatggacagcattcgtatttcacactctatgggaaactaatagtaagacttaagagtccatggttacatggagaagtagctgagtccagggctcctgtaggagaatggtatcacaagtctacccgtgttatagaaagtaaccgaggtagggctctgtagggacccatgccaaacaaagcttggtgcttgccgccccctgctggagacatccggccttgcaggagcagtcggtccaagtgtcaccccaaccctacctgggtttctaggtttttctgtgagagttttagacagggcaatagatataaaacaagaatctcagacccagctaagcctgggttagggaattcccctcaccagggaagcttgtgttccatatgaggaagggtggaggcggggctttaaaaagaacaccatgaccatgaacacaccagaggccagacctaaacattcagcatagacagaaactcttggtgctcacagctgtttgtggtcatccctgtaacctcagttttgtatggaaacagaggcacagttaaccaacatgttgaggcatgggactgtgtatgaagaacctctgcttgagttgcgtctgtgtatagacagactctcccaggtgtgcgaaaccaggcatggctgggactgctgctcccgtgctccctaactaatccccctttggttgttgagacggggtctcacgtagcccaggctggcctccagctcactgtgtagctgaggatatccttaagctcctgattcctgggctgctttctcgtgaatgctgggatcacggtgagtcccaccactccccgtttatggaatttggggcctgaaagctctttatctcgtggctccactgagcccctttgatcagggcacagggctgggtggtgagccttctggccctggctctagccatcctcagaatcctgtagtatagcagtatggctggggcactcagaggggatcagaggctggtgactctgtcattctccctctctctgccatcagggatgggggttggtgcctacccagacccgagtttctatatgccctctgaatgacaaagctgtctcttgcctctcaagaaaaataaaaccacagagctttgccagccggtctcgggggtcacctgctatggcacgtttctgttacccaatgccaagggtaccatcttgccaccttgtctctcaagaatagagaataacttcaaggggttggagagatggctcagtggttaagagcactgactgctcttccagaggtcctgagttcaatccctagcagccacgtggtggctcacaaccatctgtaacaggatccgatgccttcttctggtgcatctgaagacagcgacagtgtattcataaataaaataattaaatattttctaaaaacccaacagaatgaccctcaaaattagtccctttcttcactcttcagtttttgaagatttttgttacaagaaaaatgtgggggctggagagatggctcagcggttaagagcactgactgctctttccgaggtcctgagttcaattcccagcaaccacatggtggctcacaaccatctgtaatggacacccaccctgttctggtgtgtctgaagacagctacagagtacacatatacataaaataaataaatcttaaaaagaaaaatgtgtttaggaaccctggtttcctgtgaaaatttaaaaaaaaaaaaactgttgaagaaacttccttttgaaatatgcacagcacaagtaaatagtaatttgctgagcatgggggctgatccatgcctgtaatccagcactcagggggtggaggcaggaggattgtgaggtcaaaacatggaccaaaaataaaccctttcttaaattgcttctgtctggtgttttatcatagcaatgagaaaagtaactaagacgggactctggtatttacagtgaggggaacacagagcccacaaaatcagggatgcaatttaagatgataagcatatgattgccctaaagatttttctcctaatctttgcagtccttcaccctaactctccccagcactgcttgctgcctctcaaggcagccccctcccgcagctgctttctgtctctgcgtgctcatcagtctcttttctaaagcctttatgagacaggactcacgagatctctttaaggctctggctactaccatttaacataattattttgaaagccattcatttctgtggccaagttgtattctgttccattgtatgaacacaccatagttagtttatgcatttaccaatcaatgggcatttttagcattttttgttgagagacagacagacagacagacaagagagacttgtagccttgactggcctcaaacttcaaagatgtccatgagatcaaagatatgcgttgctgtattcagtgacaactttattctgttattgcaatgaacatttgcatatctatgcaaaaaacatacctggactggcaagaatgctctgtagttaagggcaacacaaatgggaagagagagccaggttttgccagttgtcctctgaactacacccacaaatgtatatcatgtgcatgtatgcatacacaccacacacacatacacaccacacacatacacacgcaccacacacatacatatgcacacacacatacacaccacacccttgcacacaccacacacacatccacacacatacactaataaactgtatttttagttttcatattactgagtttggagaactctttatatattctagatacaagccacttactatatatgtataatttgcaaatctatgttttctctcaaccttggtgtagaacactgactgctctcgcagaggaatcaggttcagttcccatacccacacggtggctcacagctgtctgtaactccagtttcagggaatccaacattcttctggcctctgagggcacctgcacatgtgcagtgcacatacatttaaagaaaaccaagttgccagagtggcacacgcctgctgtcctgggtaccgaatgtgaggtgaaaagagagctgaagcctaggagtttaggagcagcctggttaacagtgagccctgcctcttaagaaaaagacgagaaaaaggaaagaaggaaggaaggaaagaaacaacgaaagaaagaaagaaaagccaagccaggcagtggtgacacacgcctttagtctcaacacttgggaggcagaggcaggtggatttctgagttcaaagccagcctggtttacaaagtgagttccaggtcagccaggtctacacagagaaaccctgtctcgaaaaagaaggaggaggtggaggtggagaaggaggaggaggaggaggaggaggaggaggnnnnnnnnnnnnnnnnnnnnaggaggaggaggaggaggaggaggaggaggaggaggagccttgtgacaatcttcccagccaagtaaccatgatgcagggaaagtttttctgtgccttcttacaaaacagtcatcccaactgtgtcccctaatggaggggttgggggtagtagggtcaggagaatctcatcagccactcccaaacacctgtggtgagccgctctgccttaattgcaattggcctccggtggctggagtagtgtaggctgggaactggatctccatctatgcagccctgggtaagtcaccattccttttgagtgaaggttttccagccttttgcgggaggagcacccacgctcctttaagtaaccttttacctgtgctctgtaaggacgcccccaaacctgaccggttccccagaatgaaccctggtgaaattgtgccttggtttgtccttgcgaccttagaagggagggtagacgttacctgtgtctccctctggggagaaattttagaagcagctctcgtgtggccaggccgtgaacccttctgtagtttaccctacgatcacgtctgtattacctagcagggatgacaatttacccacaacttcagggatggagcgccagtccccaccagcccctagggggagccagagtcgcagtcttgagagcccaagtcagaaaacaaaagcaaacagcaggaacggaagcatatggccgttaggtggcgctgtctccacacactccaaagctcagcaactgtgctcctcctcacccaaaaggacggaccacaggtgaagaaggttaaaaattacactccagctactggactgtaatggagtcttaatgaaatcactgttgagacctagtgtcctaggcctgtaaacccagcacataggaaatgggaagcaggaggcccaggaattcacagccagtctccagcctcggctacatattgagtttgaagcaagcctgggctagatgagaccctgtttcaaaacaaattgttgacctcgtggatgcatagaccagggaaaggagattattgtggttggttattgtgtggcaatgtgtcagcggggacggaggggcttagagaggccaggtggctcaccaaagttacataatcaggagaaatcacaagagtcaggccttgaaggcctccataatggtcctgtgcttcctccttgccccatcctggcagggcaccaggaatgaagaatgaatgaagtttctctctgccagtgcagcccttgtccctccatcattatgtaatcactagaggaagtctgggcctttgggcattcacaagagcctgagaggaagaagctaaggagaggggcaggacttctatgccagaatgagaccatgggagtatgtattcaccctgcgacacgagggtggccatctttaccttgccaggagactagacatggaaggagggtgctcagtacctgctctccctccactgttgctgatggcaggatgcaacacacacacacacacacacacacacacacacacacatacatgtacgcatgcatccacactcaagtatcactggcctcacattgctactgcattgcttgccagaccacttaaagcaagattttgatctgctctgtgtgtgtgtgtgtgtgtgtgtgtgtgtgtgtgtgtgtgccctcgtgcactgttgtctccacagagcttagattgttccagaagcatggtatacagtcactgagtacctctgactaaaagatgatgggcagtggttggagcagacagggatggcccctggggcttctgggatacagtgggctagctgtatcccacctctgaccagcagaggaccaggcttgatacacaatgtagccttgcccaatctttgtctccctctgagcctctttctcctttcccaaagaagcatttgaggtgtctagatgtaatcgctgcacacatttggatgcctttctatgccacctgccactctgctggtgactgagctagctgcctgtcctctcactggtcctgtgtcctctccatcagccaaaatagacattctgggccccaacctctagagggaaccaaagacatcacgtgactagaaaaagcctgatctgcatccactgaggacacaggctgtgttggaggcagagctaggaaggcagacactgaaccagggttggggctctgcccgctggcctcaggtgccctctgggtgctgacttggccttggttatggatgctccagagccaggtgtcctgggcctttcagagtcatttggactcttctggcagccagagtggggttgggggaggggtggagcaggaggaggaagaagaggaggaggaggaggggcaggaggatgaggaggaagaggaggagaaagaagagaaagaggagaaggaagaggggaaggaggagggctctaaaagtagaaggcagaccggagtcacctctttcctggaggatttgaaaacaactcccaagccaaagaagaatcagtaggtggagaatatttgccagggctgagtaccagggacctcagaacccccacttccaatggcatcttgtcattagggcagcttcagagtgtcaccagatactcagtaaatacttgacagatgaatctatgacattaaatagattaatgtccaatttagaataatttgtattttagacgctgtcaggatttgaatatgagacatttctcacaaaggagaagttaaagctttgtggttcctggctagtgtactgttttggaaagggctggaaacttttggagatgaggcctaacagaagaaatgtccttggagactgtcccttgtcctggcctggtgcccctcccccacatctgtttctgggctgctgtgaagtgagcggctgccgtgaagtaagtgcagtcctttgttgcatagtcccatcaatatggtggtctgtccaagtgtgtggagccaagcaagggtgacctgagccctctgaaactgtgagcaagtctttcctccattaagcttctttctgatgcatttgttatagtgacaaaacccctcacttgaaacaggctccttcgaaggaacaagagaatactgcttctattaaatgaaggtcatgggctggggaaatgactctgtgaacaaaggcttgtcatgcagatgtgaggattggattcccaaacacacacaacgttgtgtggatgtggcagtcagcctgtgtgtaaccccagaatacagggatagagatgaggcatccacacaataagctgattagttttacctggggcctttatgcacacacacacacatacacactcacatttgcacaaacttacacatccatgcatgtgcaaacatgcatgtatgaatacaacatgggtgtacatgtgcacaagtgtgtacgtgtgcgcatgtgtgcatcacacacacaacgaaaggcaattcatggtaggggacaacagtcaacaaaaagtatagtatttcaatgaaaattagatgtggttagggagatggctcagtggataagatatcctgctcttgcagaggacctgggttcagttcccagcgcccatgtcagtcagcccacaactgtctgtaactccagctccagggggatctgctgcactctctggctcttcctgcacacacacacacacacacacacacacacacacacacacgtatatgcatgcagtacacccacacatgcacacttaaatacaaatggctattaaaaaaaatagtagacctaaatgttcgaaaatctaatttgagatatagcggagcagctggagaaacattcctggcatccaaagggagaggatgtggtgaggacagagcatcctgtgacaggtgctccctgctctctcagatactccagattaaagaaatcttagctgtaataaaagttgccaaagtagactctaaaaaatttttattttatttctcctcttcctccccctcctcccttttcctcctctcccttcttcctcccttcttctccctctctctttccctccctcctgtgatgtgtgttgcaatacctggcctctttggagtacttttattttcaagccacgccggtgctgggaactaaactcaggacctctggaagagcagccagttggtgctcttaactgctgagccatcatctctctggaccctctatgtgtaattgctaatatgatatattgtgcttactagtattgctataagaagggaaggtattatgctaaggaatagaaggagatatttaaaattcgtaagtctctgagggagagagaaggaaaatgggacccagtggaaccttagccttagctagatggctttgcttgcttgcttcctccctttcttcctttaagatttgttctcctttatgagcatctgtgtgcatgtacagcactgtctgcagagaccagaaaagggcttgagatcctctgagctggagtcacgggcagctatgagttacttggcatgggtgctggggactaagtccaggtccgctggaagagcagaatatgctcctaactgctgagtcatttatccagcccccaagtcttttattttatttaaaacttggaaacagagcttgggatgtggcacagttggtaaaatgctggcctcagacacacaaagctctggcattgatccctagccctgcataagctagggatggtggcatgtgctcataattccagcatttagcaggcagaggcaggaggacaagacagacaagatgtttaagtgagctttgatccagactacctagagatgagactttttcaatagttttctccgattttgttatacttggttcttttggtaaatatttttatggtgcttctacaactttatgattgcaagtatggggtgtggggtgtggggccttcatactgtggggcatatgagtcgctcacaggacacttggtagagccagtctctctttccatctttatgtaggttctggggattgaactcaggccctccagcttgcatggcaagtactttgccagctgagggtcttgtcacccacaatggctctattgttaaactctactgacgacagccttctctgactgacttctccggtctatcttctctggggatgcctcaccatgaatatgcatgcttcaaattctatccgcctatgtcgtaaggaaaaataaaggctatctaggcgttaacaaccgattctggctttaggctcctcttccttgctcatttaatagacgtttcgtttccgagaatcgttttcatccacataaatagacattaccccaacagctcccattgtcccaaaagccaatcccaaggcaaacaaggtgaatcaaatgggagcatgtggaagagggaccgtgggctgtggtcaaacctgtctttacaatgtctctccaaactagagtcatcctgaaagagggaacctcaattgagaaaatgcccccagcggattgacctataggcaagccagtggggcatttccttgattaatgattggtataggagagttcagctcaccgtggacagtgacatatctgggctggtggtcctgggttctatcagaaagcaggctgagcaagtcatggggagcaagcaagtaagtagcatccctccattgccttctgcatcagctcctgcctccaggttcctgccctgtttgggttcctgcattagcttccttcagtgatgaacagtgctatggaaaagtgagccataaccctttcctccccaagttgctttgatcacagtaatgataaccctacctaagacagccatcttattgtagcaggcttggaagaattgaggcagctcctggggtgaagggacacaactccacactcagcaccccaaggtcttcccccattttagggacctgcctggagccacactgatttggtttcaagactatcctacagtatagtgacgcagaattggaagttttattaacaatattttaatgtaggcttaagctggagtagttaagagaaagagaagtgttgtaaagaaactgagtcacttgagtgggagcatatacttcccaaggaaaaccacagtgggtgggtaggtggggtaagatgtgtccaggtctgagtctgggcttttcagtaagtggctacttgtctgtgatggtttgtgtatgctcagcccagggagtggcactattagaaggtgtggccctgttggagtaggtgtgtcactgtgggtgtgggctataagaccctcatcccagctgcttctggaagccagtattctgcaagtggccttcagatgaagatgtagaactctcagctctgcctgcaccatgcctaactagatgttgccatgctcctgccttggtgataatggactgaacctctgaacctgtaagccagccccaattaatattgtcctttataagatttgcaatggtcatggtgtctatttacagcagcaagtccctaattaagacattgtccaagcatcagctctgatattgttttaggggctctcaagttacatttcagaaggttactgagaaattctttgattcctcccctctttctctgtgtgtgtgtgtctgtctgtctgtctctctgtct

SEQ ID NO: 490 - DNA, 1665 bp, Mus musculus
gggagagagcgcgggtggcgggccaggccgcgggacagccgcaggtggggcctggagcggtggccggatcgaggcagccccgcagccccgcgcgggagccaagatgcctcgcggggactcggagcaggtgcgctactgcgcgcgcttctcctatctttggctcaagttctctctcatcatctactccaccgtgttctggctgattgggggcctggtcctgtcagtggggatctacgcagaggcagagcggcagaaatacaaaaccctggagagtgccttcctggcccccgccatcatcctcatcctcctgggggtggtcatgttcatcgtctccttcatcggggtgctggcttccctccgggacaacctgtgccttctgcagtcgtttatgtatatcctggggatctgcctggtcatggagcttattggtggcatagtggctttgatcttccggaaccagactattgactttctgaacgacaacatccggagaggaatcgagaattactacgatgatctggacttcaagaacatcatggactttgttcagaagaagttcaagtgctgtggcggggaggactacagagactggagcaaaaaccagtaccatgactgcagcgcccccgggcccctggcctgcggggtgccctacacctgctgcatcaggaacacggtaactgcatgggtgctggatacagatgttgtcaacaccatgtgtggctacaaaacaatcgacaaggagcgcctgaatgcacagaacatcattcacgtgcggggctgcaccaacgccgtgttgatatggttcatggacaactataccatcatggcgggccttttactgggcatcctgcttcctcagtttcttggtgtgctgctgaccctactgtacatcacccgtgtggaggacattatcttggagcactctgtcacggatggattgctgggacctggtgccaagtccagaacggacacagcaggcactggatgctgcctgtgctatcccgattagctatgctgattgagctatcctggcccggcacagcagctcccagccggactgtactgcaaagtgcatctaagactacacaagctggacaggaccagctgcagctcctctgcccacccacggcgctgaccaaagcccagggtgtatgtacctgcgtatagtgtctgatggccactcctcctaggggaaagctgaaccctgtgggatcccgggaacagggatagcccagctccggttctgagtcctggagaaggcagctcagggctccgtgtgggctctttttctttctggcagtgccttggccagtggtcattatgccccttcaagggcagttttgcagtgattatttttaaaggcaagaagggagtgtatctgttctatagggaagtcctgggtgcagccctggtacactactctagatgtgacgttggactgtgtctcaaattcccaggtgccttgagtcctctgtaaggctcctgctttgcccacccattttctacatatgttttttttctttttttttttaataaccgtgttttgtatacaattaacaagagtttctggctattcaaaactagccacccctgaccgagtccactcacccctccccgttagttcattaattgaacaataaatatgtgttttggggggtggtcttt

SEQ ID NO: 491 - protein, 331 aa, Mus musculus
GESAGGGPGRGTAAGGAWSGGRIEAAPQPRAGAKMPRGDSEQVRYCARFSYLWLKFSLIIYSTVFWLIGGLVLSVGIYAEAERQKYKTLESAFLAPAIILILLGVVMFIVSFIGVLASLRDNLCLLQSFMYILGICLVMELIGGIVIFRNQTIDFLNDNIRRGIENYYDDLDFKNIMDFVQKKFKCCGGEDYRDWSKNQYHDCSAPGPLACGVPYTCCIRNTVTAWVLDTDVVNTMCGYKTIDKERLNAQNIIHVRGCTNAVLIWFMDNYTIMAGLLLGILLPQFLGVLLTLLYITRVEDIIHSVTDGLLGPGAKSRTDTAGTGCCLCYPD

SEQ ID NO: 492 - DNA, 76180 bp, Homo sapiens
tcaaaaaggctcactggacacagtagaactctagcaggctctgccagctcctgatcgcattcccagccctgggaccccagcctggagtgaccatctcctgtagcatataaccacttgccagattcaagaccctctagtttggttctgtcatctggcctgggccattgtccccaggactccccagatgtccccttctaaaggctgaagatagttcctctgtgggttccataggcttcatacacctgctggtatcacctctctgctcccccgaccactgatggggataaaggcccagaaagcctgctgaagtctcagaacttaaagaacctgacttatgtcccacttccacccccaaacacacagacagaacctcagggtatgaagagcagttcccaccacactcaatacctttctacatcaccttcaatgactgcacagggctcacagcatggttgtgccaatcacccagtaatagacaccatggttggtcagttaggtcttcatgaggccatccactctccccagctggtagtcaggagcagcctttcagcagggagagcaggggacaggaggaaggacaggagtcctggggtgggggctgcaaggacggctgttcagtaaccaaaggtaggaatgggcctagggatgcatggaagaggatctgggcagtcggccttctgtgggggcagtggtggggctgcagaaaggaagccaaaaggagcagggcttttagaggcagctctctgagggatttccaaaacaagaagccgctggggtgacccaggcccttctgagtaatgagcattttgcatgtccttggaggctgttgtcccaaatcccctcgggcccaaagtcactaaagtgtgcccatcaccccatgcaggaccctaagcggtgtgatcatagcctagtctggttgtttgacaatcattgcagaataagttgtgtaatttgcaaagtcaagcacaaaacataaataatcactgttgtctttaattttcctcttaagtatagagcataaaactttgaggaggttgctttcaacttcaaaagaattaggaactagtgccatgggatagcatttcccgaagtacatttccagatatgctagttccttgagatgttaatagctggtgtctggggaaaatgttgtgtcctcaaatacagttgagagaggctacacatccttctttcctcttagagacacacaatactgcatccgttctcattaaaggctatgaagaagtcctgcagtatttcccagacttatttaatggatccttttttaaaaaacaaacaaacaaacacttaaaatctcttggaactactattttgcagtaacctgcctctccatgtaaagtttcaactccaaccagtattgaactgccaatatttgagctgagtgtattgttccaatttgctttttaaccacttagttaaatgattttattctaacatagctggggctacaactgcattggagtaaaaagcacattgcttgctgggtcagggggcactttaacttcttttttttttttttttttttgagatggagtctcgctctgttgcccaggctggagtgcagtggagcgatcttagctcactgcaacctctgcttcctgggttcaagcgattctcctgcctcagcctcctgagtagttgggactataggcacccaccaccatgcccagctaattttttgtatttttagtagagatggggtttcactgtgttatccaggatggtctcaatctcctgatccgcctgcctcggcctcccaaagtgccgggattacagacatgagccaccgtgcctggcccactttaacttcttaatggagaaaaatcagtttacttctctgaacttcagtttcctcacttgccaaattccatgagttgtgagatttaagaggtaattaattatgtgaaagcccccagctcaatgcctgatgctaaagaaataactggtagagaatgaatatagagccttgggagttgaaagacaggagtcatggaaaacttggacaacggtagtcctttttctttttctcctttcccttttcctttcctttcctttcctttttcttttatctcctctgctctcttctcctttcctttcttttcctttcctcccttctttctcttacttctttagagatgaggtctcaactatgttgcccaggctggtgtcaaactcctggcctcaagcaatcctcctgcctcagcctctcaaagtgttggaattacaggcttgagccactgtgcccagtgaagtctcttttctttctttcttttttttttggggggggggtttgttttttttttttactcatcactctactaatgaagacgaagtcccatttcaagaataaatatatagattgaaaactgcagtatttgcggggaaaaactagaggaagaggaaaagaaggggatgggtatttgagttccttttttttttttttttttaaaggatctatgatgctgggcgtgactcacgcctgtaatcccagcactttgggaggctgaggtgggtggatcacgaggtcaggagctcaagaccagcctggccaagatggtaaaatgctgtatgcactaaaaatacaaaaattagccgggcacgatggcagatgcctgtaatcccagcgactcaggaggctgaggcaggagaatcacttgaacccagacagcagaggttgcagtgagctgagatcgcgccactgcactccagcctcagtgacagagcaagaccccatctcaaaaaaaaaaaaaaaaaaatctatgaatataacagttagcatttgctgtaaaacaaattaccccagaatttagtgccttaacccaacaatcatgtattagttcgtaattctgtgggttgacaaatttgggctgggctcagctgggtggttctgctggtcttgcctggatccactcacatggatatagttagcagttgggctgatgggctggatgggctaagatggtttcactcacatgtcaggcagttggtggctgtcagcaaggagccatggctctacttcgtgtggtctctccagcaggctagctcagaactgttctcatgacaagtcaaggcatttgattcctagggttagaactcaaacctcacttccatcacgttctattggtgaaaacaagtcagaagtgcagcatagattcagaaggtggagaaatagattctacctcttgatagaagctgtaaggagttcatggtcatttaaaatctcccaaataggctgggcgcagtggctcatgcctgtaatcccagcactttgggaggctgaggtgggtggatcacgaggtcaggagattgagaccatcctggctaacatggtgaaacccagtctctactaaaaatacaaaaaaaaaaagaaattagctgggcgtggtggcaggcacctgtagtcccagctacttgggaggctgaggcaggagaatggcgtgaacccaggaggcggagcttgcagtgagccaagatcgcgccactgcactccacgctgggcgacagagcgagactccatctcaaaaaaaaaaaaaatctgccaaatagaggttactcttgtgtatttggtgttttgggaagaagtctatgtgcaaactcccttgtgaatggtttcacaactgcttgaaagagtgtcttcttccctgtgtttcccgtacttacttcctttacttcttgcccttcctctcctttatcgattctaataaggctttcacccccacactctgtggaaagagctctcatcaggtcattgtgactcacaccttgcaaagccaatggatgattttctgtgctgcctccacttgacctctccgggcatagtagaagccttggcgcaggttggaaggggagttcccaggacacttagtcctttcccacatctctttctccttctccaagcatccctgtcccctcactggccttgttttccttcttccttactgactgtaccttctctgttttctttgctgcctctctccttctcagtgtaggaggtcccagggtcggcctttgtctctcttttctcttcttgctatactttctccctagatgacctcatataggccaaagtttaaatggatcaaatgactctcaaatctgtatcatccaacccaaacctcacctctgagccccccagacaactgcacctggattttgaaaagacatctcaaaagataaaatggccaaacaaagaaattgaattttttttaaagtatatgtgctgctgaaacaagcacaacagtaatttgagttttggcctaacctcccctgccactcttctttatctctcttgcctttgtaaatgacagcaacatctaccaagggatcatccttggtttctctttttctcacactccacacccaaagcatcagtaagccctgctggctctacctgtaatatatatccccaatgcaactgcttgtcactatttccaatgctgtcctcctagtccaagtcaaaaccttcttgcactaggactgctgcaacggcctcctaaccagtcttcctcctccctccccttctgtaggttcccccaactcctgtccatcctccatacaggagcctgccaaagcacaaatcagattctgtatcaccttcctgcttcaaacctaccaatggccctcagtgaaactagaaataaatctaaaccattttctaaagccaaaggctctttcgtatgtctctgaccttgcctccttccactctcccaggaaccccttgcatgagccacacagatctctccaaggcctttcctgtcccctgcctttgcacttgctgtttcttccacttaaaagctctgctctcagatctttagcagggatccatatctgaaattatacttttctgttttttttttttttttttttttttttcaggcagggtcttgctctgttgcccaggctggaatgtagtgttgcaatcatagctcattgaagtctcaaactcctgggctcaagcaatcttcctgccagtgactcctgagtagctggaactgcaggcatgcaccactgtgcccagatggtttaaaacatttgcttttgtagagacagggtctcactttgttgcccaggctggtctccaactccttgccttaagccatcctcccacctcagcctcccaaagtgctgggattaccagcgagccactttgcgggctgaaatgatacttttcatgtgtctgttttcatgtgttgcatgttcctacaacccctcactctccaacagaatagaacagaagctcttgtttaccttgtgtatcttgtttgcagttgtatcctcagagcctgggcaggacttgactcacaggagaagctcgttgtgcatttgctgactcatctattgactgtgagaattatagctaagattgttagagctggaagagaaacaggccaacctcattgtttcacaggtggggaaacagaggcacagacagagacctttgcccagtggcatgaatacagacatacccaagtcaaattggtcatgcataattgttagcttctttttcacaaactgtaatagccattaaaggcaagggttagtcatttccccctaaatctcactgtcaagttatcaagaaaacagatctcaggacggattctgctgcccatacgaatgtctataaaacaaacatttattagctagtagccacaaaattggttcatacaacctttctgtgaaactcaaaaaggcccagctttctgtccttttaggagctcttccaccttgcaagaagggtctgctggaggaaaatacaatattctaaaggcaggactcagtttgactgatggctgcattggaatactttgagacagaagcactctcaagcctttagctcagtgtattatccataagtgagaattagcagcttcccaagattctttgacactgtttgaacaaggaatgggtggtgccaaaactattttagccaatctaaatatctttaatactgttaatttctccaaaggagactcatttctaatacctgttatgctaattaataagcccagaattttaccaatccattcattatgctaattagaaaagccttgggggtggattgagatatggatatttgcatgggatactgagtgattgttccagactctgcatgcctctgaactcccaagttcattgaagtgaagttggtaacttaaaatcagacatggtggaagtatttactttatggaaattggaatcccccacaccagctagtttttaaatatttaccagtatatcagtggatagctgagtaagtgacttctggaatgtggctttctggtaagatgttggctgacaaccttaccctcatgactacctctgtaccagtgatgcttaattctggttgcactttagaaattacctgggggagtccagacacaatggctcatgtctgtaatcctagcacttagggaggcggaggtgggctgatgatttgaggtcaggagttcaagaccagcctgaccaacatggtgaaacttgtctctactaaaatacaaaaattagctgggtgtggtggcgggggcctgtaatgtcagctacttggtaggctgaggcaggagaatcacttgaacctgtatagcggaggttgcagtgagtcaagatcacgccactgcactccagcctgggtgacagagcaagactgcctctcaaaaaaataaaaataaacataaaaatgagaaattacctggggagtttaaaaataatactgattaccacgttcctgttggtggggattttgacttgactgcagtggggcttgaatatcaggatacatttaaagcttaccaggtgcttttagtctgcagctagggttgcattcacacctgtgtgtcacactatgccacacattctaacagtcctacaaaaaagtaatggcaaaaccaggatttgcaccaggcctgctggcccctaggccagagttcctggctaaaggaggaaaagtgggaaacagatggccatttcttctgaggtctcagtgtttgcaaatgtggttcaggaggagccctagtgcttggggtcagggtcaggattgcaggtggggaggcacagtgaagaagcccagcagccagggaaaggctgtgccagccccaaagagctccaaggctctttgtagggatggctcacctcgagggcttagggagagctgagagggcttgctaagaagcttgtgtgtcaccagggaatatttgaaagatgagagaaaatgcagctggctggagaggccagaagggaagaatagaagtccaggggcaactgggaaggaaacctgatggaggtgtgtggcagtttcgactgtagtttaaatatggagaatgaaagggaactaggaggctaaactagccttccagggtatgaagagggttccaagcttctatgggtggggaagagactagcacctcaaataatgggtgtggacttagctctgcagggctgggtggaggctctagccctcaaagaggaataaaaagttagtcttcctcctcaaaggacagaaaggacaactttttttttttttggggaccgagtctcgctctgtcatccaggctggagtgcagtggcacgatcttgactcattgcaacctctgctatccaggttcaagtgattctcctgcctcagcctcccgagtagctgggattacaggcacccatcaccatgcccggctaatttttgtatttttagtagagccagggtttcaccatgttggccaggctgatcttgagctcctgacctcgagtgatccccctgccttggcctcccaaagtgttgggattacaggtgtgagccaccgcgcccggccagaatggacaacttttaacactatggtaagatgccttcttggccctcagataatcatttgagggcagcttgcattactctctggttctctttccaccttttcttttccctgttgttttttttttgagacagggtcttgctttgttgtccaggctggagtgccgtagcacaatcatagctcactgcagccttgatcttttgggctcgagaagtgatacccccacctcaccctcccaagtagctgggactacaggcacgagacaccatgcttggctaatttttttgattttcagtggagatgaggtcttgctacgttgcccagactggtctgaaactcctggactcaagcaaacctctcaccttggcctcccaaagtgcagggattacaggcatgagccactgtgcctggctctggttctatttctctaccccacacaaacatcctcccaaggtttgtttgttttgtaccaggaaattggtttccttttacccttccaggcatggcactgcctccctccccaccccccaatcttgctttcttcctcctagggcagagctctgggggctaaagccagcctggactaagtctctgagtctgtccttctctgttgagtttgtgtatgcaggagccctgggaacccaggactggggacttgtataagagtgtcgttcctgaaatcaccaccagggaccccacccagcactgctagagcttatgacctctgccatggatttaattactgaaggccacagcagggattgtctggctcccaagtcccaggctgagctaggcttgggagacaggaaacaacagtgagtaaagctgggaccatctagcatgagagacaggctcacagccacctctggtcccaggctgagaaaaggccaggtgggaggaggctgggttagtggctggctatgtgcaagagagggagctgcctccctcacctatagtttctgtttgtttgttttttgtttttttgagatggagtctccctttgtcacccaggctggagtgcagtggcgggatctcggttcactgtaacttccgcctcccgggttcaagcgattctcctgcttcagcctccccagtagctgggactacaggcatgcaccaccctgcccggctaattttttttgtatttcttagtagagacagggtttcaccacgttgtccaggctagtctcgaactcctgacctcaagtgatccgcacgccttggcctcccaaagtgttggtattacaggcgtgagccaccgtgcccggccttgtttttgtttttgttttggagagagggtctcactctgtctcccaggctggagtgcactggcacaatcacggctcactgcagccttgacttccctgactcaagcgattctcccgcctgtctcccaagtagctgggacaacaggcgcgccaccgtgcctggctttttattttttttaattatagagtcggcgttttgccatgttgcccaggctggtcttgaactcctggggctcaagccattcgccctcctcagcctcccaaagtgctgggattacaggcgtgagtcaccgcgccaggccttcaacctagtttgaagatggggtttcccgggaggaacccttcccaaggctgggttatcacctggcaaaagaaggggacttccgaggtcgtttggtgaaggccttcagcagatctgtttcacgagcaaacttcagactccagctccatgggggcctattagccccaccctggtctgcctccctgagccttcctgagccgagcaactccacttccttattccattcacgtttagcacactcatttgcactttcaacacctgggcgattaattcttgcccttttcccaaagttttccctcttgacaagaggaaagcttgcatttctatgtaccccgattaggcacgctcgctctctccttagagcacctctggttcacctctcccacgccccctgcattagcacaggcgtttccagagttgcacgcgagctcatttgcaagaccgtctccccctcccatcccttcttggtcccctctagggcccagggcagcagccccgcccctggcccgccccctcccagacgctaggcagccgcggcctcccattggccgccagggctggcaggcttcccggctggggctgtgattgccgcgctccagtgtcagtcccggagagaacgccggtggcggggctggtagcccggcagccgcaggtggggccacgagcgctggctgagggaccgagccggagagccccggagcccccgtaacccgcgcggggagcgcccaggatgccgcgcggggactcggagcaggtgcgctactgcgcgcgcttctcctacctctggctcaagttttcacttatcatctattccaccgtgttctgggtgagtgaccccagtagggcccggggatgggggtggggacccacaatccggccgccccctcactggcccggggttgggtccacacttagccgctccagggagtgcgcgggtgagcgcgcgcggactccttgtctttctacctcacattcgggcggccagagctcagcctgaattttcagccgccctttcgggagtgtgagagccggttgtcgaccgaccgagtgccacctggctcacctgtgtgcaccggctgggcggtttgcccgctgtgcgtccgctggccggctggctaggctgaggtgaacgcgctggccgcgcccaccacgcctacccggtaggactgactgcctctgcatcggcctgtggagcttaagtagttaggatttgcagtcggggttgggagacctggattccgggtctggtccctgctagttacttgctgatgcccctgagcgagacgcttccccgctccgtcttggtttcctctttggtggatgcacgtgcctcctgcgtggcgaggagaagtccaccagacgacgtctcctgcacacctaggtgctcagtttccgctgtcgctgggctttacctcctcctctgccttgttagggggcaggatggtagtgtttagacatgaaccaagctttgaattccgtcgctccgagtggtcttttattttatattttattttttatttaaaacattgctaatctctgtatcgttccaatttcagtttgtgcgtttctgaaatgagcacttgctgagtgatcttggggaagttacttcattcctctcggccatggtttcctcatctgtaaatggacacagtaattatattcaacttgtaggatgctcgcggagattacgtgaaataggccgggtatggtgcctagtgaagagctcaagaagtgtgagacattattactatcgtgggcagggaatttggacacctgtggtgtaagctgccccaagagattgggtttctgtaagggcgtttcatattaggctgggccctattctagagatgaggatatcttcctataggccagctccgcccctgtcactccagaatcgctctctgcctgcagtatgccacaagagcagacttgcccagggacccagggtggtcactgacaccccattcccaccaaatacacacactctcccctggtgtcctccttagccccttgctgggtctcttctgctagcaggagctgctggatttgccatcaggactggctttccctgtgacccctttgtgggtggggccttgcctggtaatcggagatccagattcagctctgttactgacttatggatatcttaggcaagtcactttcctgttttgggcctcagaactgttcattgacttttccatctagaagactagtctgaggccagtttccaatccaattctctgactctaggtaatgtggaggagagatgaacagtatgtttggggggcggaggatggagcaaggacctgttggtggaagctctagggagacagaaggtcatatgtgggatgggagtgggggtgatttgagctataaatcagcggttgcatcagattcttgtgccctggcataggtatttatttaaatttacataagcttaattgtagtaaattacttactagaattaaggtaattctagtgtgcagtcagtattgaaaactgctgccctagatggtctcataggtcccctaagtccccaggatttctgtgcctgccccttgtgtgttctgtgagcccttctctctgtaaatcagagttgaaagagcctaaggttgatgggtggggaggtaggaagatggagttgtattttgggcttcaccccttccccagatatataatcacaaaccagtctctctacctcctcacgtttccattttctcatctataaaatgaataagtgaatctctgccctgtacctcactgaattgttttaggattagtgatatggggaaagagtgacatatgagcaaaatcagtgcagtacaaacatacctcatgcagttaaataaaactgaactctaatttttaaggctttgttctgtcactgtcctttgcagcccccagagaagcccacccaatggcccttgccttgcttctcttgggcagggtggttctcagaacttggaatccctcctctgccaactgaggttgccttaccaaatccttaactcccatccctggaagtatttctgtttaaaagtctctacacccatgccaagaactcagccacctgccaactctgccagagcagctccaggtgccagagtttgactgcagggcagggcccagtgtgagtaagtaatctgtcctggaccaggtttactgttatttggaaaccatttacaggaaagcctattatctctggtgccatctctggtgccatctctggggttgagggaagggttacttgctttgtaagtccaaactgctagcaatttgcatctcagtttttaggtctggagggccataagttttatgacagccttgtaccttctgtaagactttttgcttactttaaaaattactactggggccgggcccggtggctcatgcttgtaatcccagcattttgggagactgaggcgggaggatcacccgaggtctggagtttgagaccagcctggctaacatggtgaaacctcatctctactaaaaatacaaaaattagccaggcgtggtggtgtgtgcctgtaatcccagctactcgggaggctgaagcatgagaattgtttgaacccaggaggtggaggttgcagtgagctgacatcgtgccacggcactgtagttgggtgacagtgtaagactcggtttaaaaaaaaaaattactattgaccaggcattgtggctcatgcctgtaatcctagcactttggaaggccaagatgggcagattgcttgaacctgggagttcgagaccagcctgggcaacatgatgaaactctgtctctactaaaaatacaaaaattagctgggcgtggtggcatgcacctgtagtcacagctacttgggaggctgaggtaggaggatcacctgagctcaggagacggaggttgaagtgagttgagattgtgccactgcactccagcctgcatgagactctgttgcagaaaataaaaaataaaaaataaattactactgatagaaatgcatgcatgggcttgttacaaaatttagaagtagaaaagggtaaggccgggtgaggtgtaatcccagcactttgggaggctgaggcgggcggatcgtgaggttaagagatcaagaccgtcctggccaacatggcggaaccccgtctttactaaaaatacaaaaattagctgggtatggtggcgtgtgcctgtagtttcagctacagcgagggctgaggtggagaaacgctagaacccgggaagcggaggttgcagtgagcctagatagcgccactgcattccagcctggtgacagtctcaaaaaaaaaaaaaaaaaaaaggaaagggtagtggttagtgacaagcctcccctcctacccctctctcctggcctgcccagtccagaggaggcctttgttatcagtttcctgtcactcttttctgagctatcgtagtcaaaggatgtcctaggacaaacatatgtatatttaaaataaggtagcacactatacacagaactacgtatgtagcccctctttcacttaaatttaaatccacgtgaattatggagatctgctaggagctgcctcattctgtgtgttggctacatagattccactctaggctatgccacatttatttaatagtccccagctggggaactcttaggttgttcccagtctttctttccctctctttctttctctttctttctttcttctctctctctctttctttctttctcttttctttctttctttctctttctttctttctttctctctctctctctctctcccccccccgtctctttctttcttcctttctttctttcactgagaacagtgacacagtgagtatctctgaatgtgtcattttgcatgggtgtatatgtctgtggagtaattctaggagtggggttgttgagttaaggggtatatgaatatatgttatacatgcagacacgcacctgccatcagtatatacagcttgatgagttttcacaaagtgaacacacctgtacactgagcccccaggtcaaccagcagaatggacagcagaaggcagatacccctcaaaccctcttctaggcactatctcttacctttgtgggtgatcaccactggattatctagcagtatagaatagctttgcctgtttttgtatgtgcatttaacattttgatgttattaaattgtcctatatagaggtgacaccaattgtaatattatttacttaatatgtttatttaaatttacttacttttttttttttttgagacagagcctcgctctttcacctagactggagtacaatggtgtgatcttggctcactgcagcctctgccttccaggctcaagcgattctcctgcctcagcctcccgagtagctaggactacaggcgcctactaccacgatgggctaatttttgtatttttggtagagacggggttctaccatgttgaccagactgtctcgacctcctgaccttaaatgatccaccagcctgggcctcccaaagtgctgggattacaggcgtgagtcactgtgtccagcctaaacttcctttttaaacttaaatttcttttcctttttttcccttttttaaagtatatattttttattttccaggcacataggttcaagttgccctgaatatgcacgcctttaaatttatttttaaaaggaggctttatatcagtattatgaatgggaaaccaagacgcccatcataaatagcaggtaaaggtttaaaataagtacagtacagggaaaacaaaacaatgatactaaatcctagctggatgtcatgggtgctgaaggctgtgaccctgacgcctaccctctctgttcaaaaggtaggttggcaagtgcttgaggggctgaaagacaaactagcacccaaactgagacccgctccttgatgcaatcggaggggtcgaaagggcattgaacgaggaaagctcagtctgtaagtccctatgataggtatacccctaaaccacttatggttatctgtcccacactcagggccctcttgttttcggcagggaactttggggctgcaaaagggtgtgtttgaggctcacttgtcagagctggcatgtaccccaggtccctgcatcctcaggtaggtgctccttggcccttccagtaagtcatggggatgtctgcgggagaaatgagctcacgctgaggcacttagagcctccttttcccaccacacagggtgaatcattctgacacatgcgccctcagcccattggggacacacctctaattttagcactgcccacggggtatcttagagatccgtttacaggactgcttttccttgctggactgtgggctcccagaggtcaggattgtagttcatccatatcctcctctgaatgctgcccctggggcctgtgcacacagtaggtgctcaggggaggcatgttgcatgatggtgattgagtcccacttgtacctacaaggcgaggatccagcttggggcagaggcctggctgggggtgtaacccgcagtggtcaggtctgctgaggccttgactttgcaaagtgggcagggctgatcatggtgctacggactctccacagagcaccaagcctgtttccttgataacagggtaggactttcaagtgggtaaaggtgtcatggctggggagtgttgactaatcaggaagaaaaggacttggtgggagttgggggcaagtagggaggagctgagggtgggtaggtggtggaggcagcaaatgccagaggcaataggaactctttctgggctttctccaaggatgaacctgcttattagagcttggcctgtgatttcttacatttcttatagtttaatggttaagagtgtgggctgtgtaccaggttgcctgggttcaaatcccagctctgacacttaaaggttaagtggcctagacataacttccatgcacctaacctacctgaagagttgctaagcagattagatggattaatacatctgaagagcttagagtggtgcctggcacatgatgaacactccatcaactagtcatggattagtcgttcttttcctgccttcctctctagccttgctgctcaagagccatagactaagaatgagaagggctgttaaagacacctctagtgcagccttttaaatttaccgataagaaatcagaggcctgaagagaagtgagttgcctgaaagcccacagcaagtcagtgacaggccaagaccagatccaggctgcctgactccagtttcttcctcgggcccccatgacctttccaggcgccatgtatgtttctccctggtctcagggtgagggtagaagataacctttctgaaagaggccacgtccctggcctcccagtgaagcactaggtgaagccaggccaaaaagaaagcacttctctggagacagtttccaggagatttttactttcgagaagagctttattatttttgtgaaaataatacatgcgcatagcttaaaagattcaagccatttgggaaagtacaacgaaaacagcaaaagtcccctttgattctaccactgggattcagccactgttatatgttggtaaacatccatctggacatcttgtacatatatgtagacattttatttctttaattatctttcttattgtgtttgatttgtcgagcaaagttcattttctggctctaggtaagcattccaaatagtgaaactcaaatagtgaagctgaaagtggggcagccttcatattggagaagtggccagccgtgcctaacgggctgtcagagatgatctcatagcatcagactgggctcaggcctcgggcacagagaggtcctcccctcccccagtctggccacagagcctttaaaatccagagaatcagggctgcagccctgccaggggtttggagaaccttccaacaccttcattttatagatgagcaaactaaggccctgagaagtgtccttcgctcttaacctagactttgtacatggtctcgttccccgctttaatagaggaattgctttatgtcgtaggactggaccttgctgcctttgggttggttcctggagaagcaggaataaccacctgccctcctgcccggaggcctttcttcccaggtgactcacagtgccaccctggggtggggctcacggtcaacctgataagggactgataatgaaatttctgtaccaactggctccacacaggggaaagatgttttctgggtaagtctggtcagaagaggttgatggggggaaaacaaaacagccaaaaaaaaaaaaaaaaaaaacaacaacaaaacaacctttcccagagagaacttttagatgtgaatgggtttgaattgacttcttgttggaaggcaggagcattcagtcttaaccagccgtgctctctggttggttggtttgttcattaagtcaacaaatagttatttgatgcctactgaatgccaggcactgtgataccgtgataggtgtgggaagcaactatgaacaagacaggtttagtccaggccttggaagacagagcagtaaataaatatcacttgtgataggtgctaaggagaaaattagggagcaagtggggagggatgggcgtttccactttcgatgatgtggtcagggaaagcctttatgaggagctgacatttcagctgaagctcaaatagagaaggagccagccataaagacttgtccagagcatcccaggcagagagagccatgagttcaaagtccctgaggcaggtcgcaagcatggctacagcagatgaggaagcccgggaagggctgcgctgtgggtggagagggtggcaggggcctggctgtgtgaagagtttggggttcgagtgactgagaagcagggtttcattgtcaggccctgtggtcttgccatccagagacctagatcaggtgttggctattctgtgtgacactgggtaaaggaccagctctctgagcctccgagatgcctcctctgtgggtaccccagagggcagtggggaggatcctgtgagatgagaggtgccaaagcacggggcctactctagggtcccccacccacggagggagggagactctaggcacccccccccccaacgaatggagggagactctagggctccctgcccacggagggagggagagtcacctgggagccttgcattgctcaggggtagtgagggagatgagatgagatgagatgagatgagatgagatgagaacctctggaatccgtcttgtcagaggaggctcctttgcccctgggggtactcagcctgcctagaacagatggctatggaaccaactcctccagccagctggtctgacccctagggtgtgcatgtggtcttttccagaggctgggcccctcccaccccttagtttctgggctaccatggcacactgtcagaagcactaggccacaacaggcacgcggggccaggcaggccctcctagaagtgtcctgctaggctctgaggggtcccagccctcggtcagcatgagttgttcagctccaagctaggcccctgggctggtggaggtgaggaagagacaccgtagagacactgtagacttacgatgtcaccttccccagctagagggttggcctgtgaaggagctggcagccatctctgcctctggcgatgtgccatgttagcccaggaactaaggggtgggaagggcccagtccctggaaaagaccacatgcacgcccaaggggtcagaccagctggctggaggagctggttccatcaagggccagtctgagctaggctgcctgactgtggtggcctgaccaccacattttgcttcatctctttggattctcagagtgacccttgagctgggctggacagggggtcttgtcctgttttacagaggagtctttgggaggactctgagggcttcactgggcagggaggcctcgcagagaggagtggagatgagtcttaggagagggagggcgggctacagaatgttttttgggcctgagtgttgaggtcagaaatgtcctctgggaagaccaggtctggaggccaagcagagctgaggaggatgagcacttcttggttggcgggtgaggagaaggtccatgtgacaagtcatggacaactctctgtgccttggttttcttgtctgctgggaggggataactgttgtgctgcccacaggggtgaggcttagatgaggcagtgcccacagagcgctgagtgggcatctggctgggtaaccgttcatgcagatgctgggaggagacgccgtctgccacgtgtctcaccacagtttgcttcatctctttgcattctcagaatgaccccatgtgccttgtcccattttatagaggaggagactaaggccctgagcggggaagtaacttgtgtgagaaccatcatttgcatgtgttcctgggacaagaactgtttcactgtgggaaaggttactgttgggttttaattttttccaaaagggactttctcgccaagacatttgcatctgggcctgcagggaagcaagtatttcactggagggtggaaggaaaacagccttggcccagatgggcttgtttttccctcttcagagccctcccacttcctgcctgggagaggaggaaccccctactcctggggccactggaagtccctctcaggatgttgcctgtgaccttgtatgagtgacacaggctgtttcccatctcctaccagagggttggccatgctgacctctccggctgtgctgggtgcagtgtggggagactgtgggggtgcttggggtcagagtgttcatttctgggcactcactgtgtgccaggtgctgggtgcaggcatgggcacagtgtggctggtggtgggctgaggccagcctctggcccaccctgtggcagattgggaccatcccctgggtgcagtagggttggggtgctggctgccgaggctgcacaggattctgagactaggtcacttcccagagtcaaaagacaggaacttcttggccagtggaccttgacttcatggctcaaggcctcctaccctgggaggatttcacaagaacacatgtccaccacccccccgccaccaccccccccatcaccagagcttctgattcagtgggtctggtctaggcccaggcacccgtaattaaaaaaaaaaaattataatgacagggtcttgctctgtcacccagagcaagtggtccaatcatggctcactgtggccttgacctcctgggctcaagtgatcctcccacctcagcctcctgagtagctagaaccacaggcatgtgccaccatacctggctaattttaaagttttttttttttttttttttttttttgtagaaatagtgtctcaccatgttgcccagcctagtcttgaactcctgggcttaagtgatccacctgcttccgcttcccaaagtgctgggattatgggcgtgagccaccgtgcctagctttatctgtaatatttttatttttattttattttttaagtttattttatttttgagacggagtcttgctctgtcgcccaggctggagtgcagtggcgtgatctcggctcactgcaaactccgcctcccaggtttatgccattctcctgcctcagcctcctgagtagcttgggactatgggtgcccaccatcacgcccagctaattttttgtatttttagtagagacagggtttcaccatgttagccaggatggtcttgatcttctgacctcgtgatccgcccgcctcggcctcccaaagtgctgggattacaggcatgagccaccgcgcctggccctacctgtgatttttaaacttccctgggtgattctaacgtgcagctggagtcgaaaccacagctcagggtggtatctgtaagggaattctgatggtactggcgatttccaggacacctgtctctgcaggtgaatcctgagtaatgtgaaaccttcttctgacatctcttacgatctggacaggttctctgagctggggaaagttagcaaacacagttgggagaggcccagaaagaaagagaacactctagccaggggtttgggagaagtgcagggggagtcagtagggccccatgtgggcgaggaagggctggtggaggtatgtggagaccactggcctgggaatgtgggagactatgggagctggcttctcctgcagggaaccaggatgatgttgtgggagggaggggagtctgtgagttctagaattttgctttccttttggttgtcttcaaaacattcttttatgtgctctaaaggcaaggtttctatgcagttacctttgtaaatagaataagtttctatagaatcagtcttaacttttatgagtcagggattcagaaacttgtggggtggcctgtgataatttttcctccttcaatgatatctcgagtttgagaactctcgatgcaggattatcatgttggaaagctggctgtgatctccaggtcagtgaactgcagttctggcctccataggagaggtgtggcaggtggtggtctatctctacttcacagatggtgaaagagggccagacaggggagaggaccttgcttgggatcatggtggtaagctaggggccagttagcagaaggatgaggccttgatttctcactctgactggtgagctctgttgtgggttgagtcgtggcctcatcaaaaaggtatgttcttggccgggtgcggtggctcacacctgtaatcccagcactttgggaggctgaggcaggtggatcacttgaggtcaggagttagagaccagcctggccaacatggtgaaaccccatctctactaaaaatacaaaaattagccgggcatagtggcacatgcctataatcccagttacttgggaggctgaggcaggagaattgcttgaacctgggaggtggaggttgcagtgagccgagatggcgctactgcactccagctgggcatcagagtgagactccgtctcaaaaaaaaaaaaaaaagtatgaaggtatgtatgtttaggtcctagaacctgtgaatgtaaccttatttggaaaaagggtttttgcagatataattcagttcaaaatcttgaaatgaaatcatcttagatgacctgagtgtgccataaatccagtgtcaagtgcctttataagagaaaggcagagggagatatgagacggacagaagaggaggccacgggcacacagaggaaactgagtatacacggccttctgtgtgcagacaggggcagacaaaccgagcaactctgggagccactaaaagctggaggaggcaagagggcttctcccctagagcctccggagagagtatggctcaccagacaccttggcctctggcctccagaactgtgagagattaaacttctgttttaagccaccccatttgtggtcatttgttcgggcagccataggaaaatgcaagcccttctgcctcaccaggtggacttattagggaggggcccaactgagcagggagggccctgagaaccaccttccttctgtgggttgtgctgaaaaccaagggggaaggagtggggcgagaacagaggggttgggggaggagtgagactgtggggagtgaggcttctgtcccgtcctcaggccagggggccatgccctactgctggtttcttggggcttcccttctgcaaggaaaacctaatggaaagaggttaaaaccggggaaggtggatgcgagctagctctcaggaaggacttgccggctgtgaaaacagttaaatcaaaactgcttgccaagctgagctgtaaaacgtgggattccctgacagcttcagaacaggagcgtcacccattgtgtggggcagttaggatgtggcctgaacttccagtgggttgaactttgaggggccgtagagggcatctagtgttaccccttcctttcagagagaaggaaaccaagccccaagccacccagcatgtgcccctggttctgaaactctgccaatgggacaatctctagtgtgcaggggggacaatggacactactcagtggtttcaaaccaggagcttcctctccagccagggtgtggggacagaggcctgacttatgacttctcacagagaagggaagaatgttctctgcagggtcagaacccaggctgggggaaccctgttcatgcctctggcttggttctgactcagcctctgacctgggagggaccgggtcacagggacagatgaaccagccctgtccctgtccccttgagaagctggcactcactgagtcctagcagcatgctctgacagctgcagacattctgtgatctgggtggggcaagcaggcctggccagagtctcccaggaggctgtggcagagacacttagcttcggggtgttgggctctgggcttcccctgggggtggcagtggccacttggctttccaaccactaggtgggtagactcatgttcagagcagagacaagatgagggcaggagttgttcagggacccacagaccctgagatggggtggggcctacttctggcctgttcatttctacagtattttccttctccactgtggtcttctggtgccggcctcacatggaatgaaacttgacttttttcagccaggaattcccccacactctgtctagctgggttgtgccttctgcatcctcctaggttgtcctatattgtctttaaagctaacagttaacgagcccttcttgtgtgccaggctctgggctgagctgttttctagccattctctcacttcaacctccagcaacctaagagacagcgctgctcttgcctggtttgcacttgggaaagagatgctcagagagttaggtaactcactcgtgagagctagaggtggggtgtgaagcctctctctctcggcagacttacccgcttccttcctggcctagatgtttgttcttctttcttggaagaacttttcttagagtgatggactttttggggatgggtggtttggtcatttagtcactcatcaaacatgttctaggcatgagggcatctctgatcctccccgaagctctgcgcttccagaaggccatcccggtcaggtttgtaactttacgtagaagttacaagacattgctaacacagggactggtatctctgctggagtagcaccagcttcccagggcaggggccacaggctcccctagggaggtgggccggttgccaccttgtgtggggatagagggagcaagctgacctgaagtggcaccagaggccagggcccagatcccactggctctctggagctgcaggaaggcagaagtggggccagcatcactgtccttcagaaatgcatcctttaatttttatttttttggataggatatgccagggcgtgagaagtcttgttcctgatgagggagggtggcctgtggtgtgacagagcactggcctgggagctgggagacccgggtcgcagctgctgagtgagggctaatttgtggtgtgaccttgtgggagtgccagcctctctctcagcctcagattcccgtctgcaaaatcagggggttgggccagatcagcatccccccgctgattcctggtggtgcacaagatgattgtagctgggccatgggggaacatttaaacattttaatatgcatgtgggaagtgtgatgtgtattaaaaaaataattagtacctcaaacttgtgattgtgtagatcttgattagtttaggtcaggaccgtatttacttgagtaagaaaagccagtggggttttattaaaacatcgagttaataataatgcaagtagctggccaacctgaccacgtggagacgtgataggagaatggctggagtttgggagacactgggagttctcagtggttccttccagctcttttctgggaatgtaggcagtgtggcacctcttggtcaggtgcagacacttaacacagtctgtgtactgctgactgttagagaaggaagtggcttctcattatggtacagcatcttacagtttacaaaggagtttcaccacctcagggtctccttcgcgtgaccattatattcccatgtcacagtggagaggcagttggcgctctgagggagatggtctggccagcattgtgcagctcgtaagtggcccagcgcctgcagctggcctgggctctttgctgggtcgcatcagcgccagccctctgggagcccgttcctgacctttacctcctttcccggctgccactttctgcacagggtttcatggtcatgttggcttgtcgcatgcatcttctcttgtcctgattttcttaaagcagaggagaaaaggatttaaggtgacaagagaccctccttctcccttcccccaggcctcttccccatgcagtgaggggcatgttctaaagccctcggcaccctgtttcctaataggtgcacttggatgtgtaataggtaggttcccattacagcctgtatttagctccaagtagcagttagtgaaacatctggtttgggcattaattccaggccagaacaggccaccagacccaggcctctggtgagctgacccttgcctggggccactgagactttcctgatggcactgaatctggtctgaagctttaggcaaaggaagacgcaaacctgtagtaaacaaacctcttcctttagccaggtgtggtggcatgtgcctgcagtcccagctacttgggaggctgaggcaggaggatcgcttgagcccaagaggttgaggctgcagtgagctatgatcacaccactgtagtccagcctgggcaatagggtgagaccttgtctcctctaaacaaaacaaaacaaaacaacacacacacacacacacacacacacacacacaacacctcttcttggaaaacagaacttggttgctgtagaaaaggtgaaagaatgttcttggatatagttatagccacaacaccattatcatgcctaagaaaatactaagtttatgcaaaaacatatctaattgtccctaaaacatctctcatagtgtctttaaaaaaatcaggacccagcatcacagtttatacattgcgttgggtttctttttcataaaaaatgtcccagtgcatctgaaacttgaggggtgacctctgaggccctgaatgttatagcatctggggtcctgatggggactgtcgtgtgttacttgcctacgttgtacctgatccaagacctaccggggccagctggttccttttgttgtttaagggaaattcagaaagccaattaggaaaggcttgcctggaaaactgtccccacccatgagactccagcccccgcccccctcccccacgttctcattaggagagctgatcggtgtctggaagccagacccaagactccctgagtccccacccttaatcaccaggtgcacacactgggccctgtgtcaggcactggggaaagatgctctaaagaactgaaagacccccagctggctgcccacagcctgcctggggagacccggtgtgccctggtgtggccgggtcatggctcttggcaagtcagtgcactgatgtgtagggcagtggctctttgttccttggttctgatgcttggggtaggctggggtagggccgagagagctcccttctctcataccagatggggagcattatcaggtggctggagtatcccctaatcaatactttctgtatcaagctgcgatagaggaaatggacttttttttttttttgaaaaagttaaacgcacagaaaaatggaaggaggaattcaaagaacatctgcctgcttctgagttatcagttgtgaacatcttgtcttaagagctctctctaaatacaccacttctttttttgccaacccagctacaaggaggctgcagtcgttgtgaccccactcctctaaataccccagcattcgccttcccagaaagggcattcttcctcacaccactgctgtccatctgattaaaaaaaaaaaatcaccatgaaatcaaacttttcagtcctatatacaggccacatttcttatgacattcctgtgttgtaagaaatatgtttgttctttgtccccagttcctggcacagagctcttaaaacccttggaatttcctgataggaatgctttttgttattaataatgagcccgtttagtcacacctgagtttacgctgatgcgatgacttagggtaaggccctagacggccttaggatggggcgaatcaccagaaacaccaaataattagagggctggacagaaagggtgagggtgggggtgggggttggggcttggagattgagctctatgtaaaactttttttttttttccagctctcaaccagtagaagagaaaaactcttgaacaatgagatttgatgagcttctgggtttgggaactcactgaggtgttaaggggtgagcgtgggctcagagagggcctgggagctccctccccaccttgcccagtgcatctcctccctctggctgttcctgagttgtattctttgtaatacactggttaatataagtaaccctgagttctgtgagccattcgcgcaaattatcaaacttggagaaggggttgtgggaacccctgacttatagccagactttgagtcctggacttgtgattggcatctgaaggtcaggcaatcttgtaggctcttttgagacagagtcttactctgtcacccaggttggccggagtgcagtggcttgatcttggctcactgcaacctctacctcccaggctcaagcaaacctccacctcccaggctcaagaaatcctcccaccttagcctcccacgtattaggttggtgcaaaagtaattgcagtttttgccattacttttaataataatatttttttaaatagctgggacaacaggtggacaccaccacgtccagctaatttttgcatttttttgtagagatgagattttgccatgttgctaggctggtctcaaactcctgggctcaagcaatctgtccactttggcctcccagagtgctaggattacaagcataagccaccatgcccagcctaatctcgtgggcttgagcacattaacctgtgggatctgatgctaactccaggtaaatgtgtcagagttgaattaaattgtacgacacccagctggtctctcaagagaatcaaagaactgtctgatggtgttggaaagcacctcattccccaaatgttctttgtggtgatattttacccaattcaggatccacccaaggtttgtacattacttctggctctatgtctctttaatctcccccaggctagactatccttacttcttttgagtcctttgaagcctccaggccacttgatctgtaggatgtctgagttgcttcatagcttcacagcttcctcatgattaggttcaggccacacatttcctgcaggagcatttcacagggtgtgcagcgggaggtatggaatatcacattagggggtgtgtgctatctggccacaccatggttggccaggctgaacttgaccagtcctctccattgcaaaggcacctttccccatgatgatgaacacataggctgatgtgaaacaccctggtgaaagaacttttaaaagttaatctgaatgtgagactcccctgcttaaattatttcaattatttccctattccagcctcaaaatacactgcctgcttctagacaccttcacatgcccactgtggtccaggccactgtcacctcacattggtcaccacagtagctccctgaccagcccctcccacctgcatctcccagtctcttggcatagcagtccaagcaactcttttaaagatcacagccaggcatggtggcaagtgctacttgggaggctaaggcaggaggattgctcaagcccaggagtccgagaccagcctgggcaacatagcaagaccccatctcaattatttaaaataaaaaaagatcacagttggaacagagcacttctctgcaaactttcagtgcctcccatccactcagagcaaaagtcaagtcttctcagtggcctcagagtcccctcctgatcagcccactgcctcatctcctacatgctccctctccagcagccccgtcccccttgctgtttcttgaaaacacaggcacatcccaaggccatggtgcctgcttggatgcttattcatgtatccgtgtggcttggtccctcctctactccaagtctttgctcacatgtcaccctccctggccacactgacggcccctttccccagcttccctagccttcctccccgttttatttttcttagtagcacttataaccatagcacagtatatgtttttcttacttatttgcctctgcgcaagtagaatgtgagctccaccaaagctgggatttttgtggttttctttcattgctctcgttgcacacccagttcttaaaatagtagctcccaaagtgggtctagggacctctgggttcccctttcaggggctcttgtatctagaaccactttcatagtaatagtaagactcccactgccactctcttgggagcatgtgatggagtattccagaggcacctgaacactcgatgtggcagtggagccaatgaggagcagatctgagaatccagctgctttcttggcagccagacgttaacatttacaaacatgcagagcccacgccactctgcccactcagtttttgtgtcttttgggggaattttttaaatgaaaaatgctatttaacatataaatcaatctttctttctttctttctctctcactctccccttctccccaccttctctccctcccctcttccctcccctcccctccccttctctttcgactctggtacccaggctggagtgcagtattgcaatctcggctcactgcagtcttgatctgagctcaggccatcctcccacctcagcctcccaagtagctgggatcacagagccgtgccaccacacctggctaattcttcttactttttgtagggatgagggctccctgtgttgcccaggttggtctcaaacttctggactcaagtgaaccttcaacttccacttcccaaagtgctgggattacaggcatgaaccactgctcccagctatctcttgttatttctaaatgggctaataaatatttaaaataagtctcagttttaatttatggtaaataattgatggatatcatcataaacaaaagctccagaatcttcaaacatttttaacaatgaaaaggagttctgagaccaaaaactttgagacccactggctttaaacaatgcctggtgtgcaaaaaccactcagtcaatagatgtcatgtgaataaatggacttcttggcttaacccatgagacctggccttggtgctcttgcttctgtgaacctccctgttcgcctccccttcccttgtcctctgcctgtccttgattccagctctgctgacctgacctgctgttcctgtggtaccttcatgggcatctggaactccttatccctattgtccaccttaggaattcctgcttgtccattaaatggactccgttcaaacgtaacctcctccaggaagccttccctgatcttgcctttctgatttagtgtctcctctctggcgcctttgcacacttgatcacatctaccccagggttttgctgattcccacatgtgttggtgtgctggtatgtctctcaccagacagagctccttgaggacaggaactcatcttatctgcttattccaaatgtctggtacataagaggtgcttagtgtatgtggaatcagtgagtgctgccttggaattcagaatagggactcctccctccctggaattaaccctggaccaaagagggtctgaaggggaaatggtttctggcttctgacttgggttttgaaatgtcagcattacaacagtgctacatggttactggggaagaagtaacatttactgagcgcctgccgggtcccaggagcttttgcgtggcatctggcttcaggatattgtggtttgtttggccattgtgaactggcttgggccctaaccactttctgtctggcttccatgaggacagtgtggtcttgtaactaagtcaccaaacttctgtgaacttctgggacatcctaacacatttgcatagtacgtgcagactgtgaagttgttgagggcaaagttgtatgtgtgttgctggatctagccaccatgtcctgtatgctgtccataagagatacccggaattccctgtccaaagggcatagttaatactctcaatatcactaccagcaagggcttcccattgttggttttatagatattcagaagtggagagatatccctatagctggggtgatccaggaagacttcccaggggaggagggcattttgttgttgttgtttttagacagaatcttgctctgtcacccaggctggagtgcagtggcacgatcatggctcgctatagccttgatctcctgggctcaagcgatgggaggagggctttgagctgagcttggaggatgggtatgagccccttttggctttagtatttccaggaaactgtctcctttccaaggctgctatgggaggcagtgctggaggtgtgtgccttcatcaaggctggggagggaaggcattgctgtccgctttagggttttacccttgcggaaatgtgacatccttgggctgggtgggagagcagaaggcagcccgtgggggcggagtcagagcagtgtgtggggcgagaggaggaggggggccgcccacagtctgctgatgtgccgagcatttgaggggaatttccatggactacccggagcagtagagcaacccttggggttgtcatgccaactgggaaactgaggctcagaaaaggtaagggacttgcccaaggtcacaaagagttgatagcagagctgggattggagcctagggtgcccatgtggccagccgcccagtgctccttccctttcccctttgtcctctttggagacatgagcccttggactggggccatttatcttcattaaggccctgcacgttccagacacttgagatctgattgcctcctctgccttctatccatagttcaggggcaaagggtacagttccgatgtgggattccatgcaaagggggaaagaataaaccaagggccacatatataaaaagcaatttgatgcatttcttttttatataggaaactacatctaacattaaaaacaagatacatgaaataataataagccttaacattgcccaagttgtgtagagacagtttctatatgcctgattcagccaggtgtcccctgggagccggcagttctgactgagcctcacatcctcggctcctgctgctggagttcccttcatctctgcccaccctcctccccccacctgctctccccaccgcctgctccttttcagatggctctcccttatggcggcttctcctctcagcagcccagaggggtcaggacagtgagaccacagggcactcccataccccttccctggaactcctcttgccctcactttgggccccatgaggataactctcaggcagtctctagggaagaccctaggccagtggaggaataggggatgcatgaaccagttcccagacaggatgggctccgaaaggctgccaggaccttggactggaggctgttgtataggacaaagacctcctgtcatctctgtgagcccatgtctcctttcaaagggtctgagagaaggaagatctgggccatcttactcacttctgctggtggtggcctatagttacgagtggtggaggcttagctgattgggtgctgtgggctgcagagggacacagtcctggccagaggaaggaggaggaggggtgaccagcagtactttgacacaggaatatacccctgagcggttaccctgggaggaagcaagccccactccagcccaccccacccagctcttcattcctgggctccctaagcccatacccagaattccagtctcctttccccattcctaccccgcagctagagctccaaccccagacagaggatgctgctggcagtggcctgagctggggacttcctgtctcactgccagggccagacatccagggtgcatccgggagcactgtcttctgctctgactgacctctggctactgagtcagcggggtctgggggggcctggccggaggtccacccagggctgagatctgggaagaaaatcaccagacaccattacccatgtacgctggggacacagccttgggaggcaggcccgtggctctcttggttcagacacatggaaggtggggagagagagacagagaggtctggagagtgagggagaaagaaaaccagggggaggagggtgttgggtggagatgaagttgctcttgactctccttcccatggctgtttctgtggttctccgattaaccatgagtcattcttatccttaagccttggaaggctctgttccagactgggatcatcgcagagttccttctttgggcttacaggcgtctgaagccataaaccatttctcagatttattctcccagcagatatattaggccagtccctgtgctcagggagggtccagttgcatgaagtcaaactctgtgcatccttcagagtccttctctggtttccccaggaggaagtaattgctctgcatcttgtctcagaatgccttggtcagttatttgttctaccgcttctacctgcctgtccccaaactcttccccaaaacagcccagggcatgccatccccactcccaccctgtgcttcatttgtggttgttctggattagaaattccactctctgccctggctggattgaataactggggtttgcaaaactcccagcctagctccttcacagcctggaatgtgctgtgtgcctgtgggagtcttaaatcaagtatctgcaactattgccaacaggaggggtagcaaaacagactggtgtgcccactttgcttcctagagaggtttgttttccaaaggctatgtttgtcacctttgaactgatgaacccaagacgttagatgtctttctccagctcagacaccatggaaaacttgagggaggcaatgagaactgttgttaaagaagccataattctttaaagaaaccataaattaagaagggattatttatttaataacattaataaagggataatttacaaataataaatatttatttattatttcttcacttaggagcaggaagacctgctagagtagaaatgtcatttctccccaaacggatctatagattcattctggttccaatcaacgtccagttcagttgatttcctcccgagacttgagaagatgattctaaaatgtgtatggaagattcgagatctaagaatatctaggacacttctgaagaagacaggaagaagagacttggcctaccagatggcaagatgtgttgtaaaactgaagtcattacaataaggaggtttgtttagggacagacagaatgaccaatggaagagataggcaaaaacagccccaggcatatgtagaaccttagagtatgacagtggggtcatagcagatcagtggggacagaaggactggtttgatcaatgtgctctgacgttaccaaaagtaacaaacaaagttgggcatggcggttcacacctgtaatcccagcactttgggaggctgagatgggaggatcgcttgagctcaggagatcgaggctgcagtgagctatgatcacgccactgcacttcagcctggatgacagagtgagaccctgtctcaaagggtctcaaaaaaaaaaaaaaagtaacaaaagcaggctgtgtcagagaatgtcagggactgaggattacaattcaccaggttctctgtacttgatgtccagtttttataaaggaagaagtcctgtccagagtcaaggcagggtcgacagcaaagtactagtgacaaagacaagtgaatgcgcctttgctggcggcaggaggcagcctctgctgctttctcaagagctggctttgatttggggttgtgggggagccccgttcctcaagcataagtagggccaggtcagtgggatggaggttcagtgtccccagaacttagagtaccgcctggtggtcctggaggtggggccggtgctccctaggggagacagaatgggccctttagcggtttggattgggggcactgccaggacctcctatccttggtctgttttgctttccttacaggaaaggggagtgggacagcaggaacccagctgccctggggatgtgggagagaagactgttttctcccgagtaagttggtgaatacttgctgagccttccctagcttgtggcaggagggttgaagcatgtgcctttttctttttctttgagacagagtctcactctgtcgccaggctggagtacagtggcacaatcttggctcactgcaacctccgcctcccgggttcaagtgattctcctgcctcagcctccccgagtagctgggactacaggtgcacgccaccacacccagctaatttttgtatatttagtagagttggggtttcaccatattgggcaggctggtctcgaactcccttggcctcccaaaatgctgggattacagacatgagccactgcacccggccacctttttcataaggatgggctctaccttcagaaaggaaccttgtaggagtggtgaggggcagcaccagcgagagatgctctagacttgtgctgtccaaaatgtggccaccagctacctgtggtcgaatttaacttaaagcaaaataacatggaaggttcagttcctcaggcaccagggccccgtttcaagagcttgctagccacacgtggctcgtggataccacactaggtgttggcatcatctaggaagttctcagcactgctgctccgctattgtcggctttgtattttgcaaaggtgtttcacacccctttccccccagttcttcataaaaggcccatctggtagccttagtggctggccaggcagacgagttttggttgtgaatcctgactgtctcatgggttctgtgctgcttagtctctttgagcctagtctgtaaaacgagattagttgttccttggatgtttgagggggtatgttgattaagggagatgagatgatgcaggtatgacccctgacaggatagtggcaaagcataatcactataagagccaacaggctttactgttttacaggtgaaaaatgaggcccacaagcgggaagtgacatggccaagggtactgagctcacccatggaggcccagaactcctgccttctatgttgcctctgctgctcccgccagcaccctgctctgggacaggagaagctggggcagcagtgtgcagagcaggtggcagtgtgcagagcaggtggcagtgtgcagagcaggtggctgtctgcagggtgggcttggtctggggccaggcaggatgggcctcgggacagagggccttgggaagggaggtgcagggtttctctgggcaggaggagggggtcctgctagtcccactttattcaaaacctctctcaagccttggagtttagctcttccccaccccctttcaagctagaaagtctgaaaagcgctttgttttggtccaacacggagccctggacctcaaatactccatgagacggttgtggaatgaagtggttctcagggccttccaggaaatgcgggctctggcagggggctcatcctgatgttctgcgctctccctcttccctgtcacttttgttcaaattcctagagccctcttcacctctccatggcaggaatgatatttgcttcctgtagaccaggggttctttttttgtgccagggaccctttggttctctggggaagcccgtggatcgatcctttttcagaacaagatatttaaatgcataaaacgaaatacacacggatacaaaagaaaccagttatagtaggatacaattattaacattttatacaaccaaatttttgatgtaataatgtgcaactttatcagcgcattcaatcacaagatctagcagtgagcctaatactatcataattttgaagtaatgaggaatgtaaatgacattttaagatattcagaataattgtaaagtgatttctactggtgacaaaattgcaggtgccgttaatactacttcagtttgttgcccacatcccacatggaagggatatttcagttagaggtaaacaaaagtaaagatgtggatttttctccatctccagtttgagagctccctaaattccatccattggaccatcagttccagcctctcttactctcccttctcaatagtcttctggccccttgtgagcctatagaacgtaatacagggcctggaacacaacagagcctagtatttgccttttgggggtgaaaatgggccttgcaggtcctcgttaagtgcagatttgccccagctgtggtgagccagccggcacgggtgaccagatgcttccttcaggaggcacaggtgctggaatgcctcacagagtctcctgcttcccagcagctgcctggaactgggcctctccctgcacaggaggaagcagggttccaggatgcagaggaccttcaggtctggttcatgctgggccacagggctcctctgcagcctgttgaagatgccacgtggttcacaaagcctgggcttttgggcttggctgtgggctgccagcagcacgcactttccctctttggccccaaatgggcatggccgtgtgccccccacccccagccctgtttagctgaggccatcctgcttgacagatgggccatttgcttcctgttctagagctgagtggccggctgcctagtggaaggctataattagcagagtggagcggatgggattgcatgctggcattgacagataattttatcctcagatggataaactgatgtcatcagagatgtaaatatcatttggaaattttgaagttcctgggaaggtttatgctggcctctccccatgcccgctgctcttgggagcacttgaatggggaggccagagaggcctgtgctgtatggggagctgcctgggagttgcctgccaggctgctgggagggttggggtggcagctccttctgctagaccaggagaaatagggcctaggattgcttgagggagttcttggtttacatttgctttgggagcttttcccatggggtttatggtctggaaatgtctcaaggctaactagcaaggaaatggcaatgctttataacagcagagagtgagatcagagcaaggggttttgttttctgccagcaagggtgttctggagtgggtcccagggctctggggagcttgtaaaaatagaagaagccactgactgcctttatggagagggctggggtcagttctgctcagcattggggccagtggcagctctggtgtttgggggatggtttccaaagcagactaccttaactcagaagcacagtctcaggcaggaaggaggaatgggaacaggatgggggcaggggaatggggaaggatgtcagctgtccccatcctgccagggaagaagaagcatttttttttttacaacagggaacacagaactttcaaaagtatatcgggccagttctgaaaatgttaagatacaatagttgtgttcgttccacgacagggtgagaattacgcttttcatcaaaatggaagataaaaccctacctctgctaccttccagtacccgagtccctgaatattttattcactccatgcctggactctgaaaacttccatgctctatggggttcttatttaaccatgattctctgctttgaggtggatgagcctcagggctcttttatttgtccaggtttagagtttagtgagtgattcctcatgggtggagtcactgaggaaggggacttggccttttttttcttttcttttcttcttcttttttgagacagagtcttgctctgtcacccaggctagagtgcagtggtgcaatctcggctcactgcaacctctgcctccctggttcaggcgatgctcctgcctcagcctcccaagtagctgggattacagacatgtgccaccaagcccggctcatttttgtatttttagtagagaaggggttttgccatggtggccaggctgctctcgaactcttgacctcaagtgatctgcccacctcagcctcctaaagtgctgggattacaggcgtgagccactgcgcccggcctggacttggctttttaaaggctgctcgccattgctctccgaggacctggggcacttaggctgcccccaaacagtgatttctccatgttctgggttttggagcatgactgtgtctgtccagatagtctctggtttacctttctctaccaaaaagtagatatttttcatggtcttcattttcctgtagaggatgagtatgtgtatgtgtgtgtcctgccttctaaggccaacttgttagtaagtggctgatggctgagcttgtcagtgtcttgagtccctgccggcctgtgtgttggaaaggcatccttctagactggggggaaaggtctcactaatcctggattaattttcaaaccaaggggaatggcacttagccttgaaacatagcagagtactggatccaagtgagatggtttcctggtaatcctctgttatcctgtgtttctgcataagctctgtctgcttatttgacttttggcatccccgtcacgcatcaaagcttaggaggaagcagtcacttccctttattcaggacttagctctctttagaaggaggtcacgggcatctgcttaaggacatgatgatcagtaaggagacccatgaagtcagtttaaggctcaggcagccctgtgagtggctggaggggcggcctcctcggtgttttgcatggtgacactggggtggctatgctcatgtcacctcccgacaacatctgtctgtatcatcccttcctttccttggaccctagctgacagcaccatgtcttccacttactctcccatgttgccttcagcttagtggagaagtccagttatctgatgacttgtccctgccctctggaacatgaggcccagaaagtcagaatccttggacaggcaggggactgggtagacagtgcctgacttgaactcagagggtctattggaaagcccaggtcttgttcattcagaagatgttgatcataaatgctgattctacttcctcagtgtcagaatgtcttggtgctggggatgtccgaagcaattgaaaaatccctcctggagcttatgttctagtgaggaagacaaattcaaaaaaaaaaaaaaccaaccagaaatagtgtagtatgttaaatactggtaagtgcaaaggagaaaataaaaaagagaaaggagatcaggagtttcatggggaggaacttcccatctgtaaataaagtggccctgaagggcctccctttgcaggcggcaactgagcaaagaagagaaggagatgggggagtaagccatgagtgtgtcaggggaagagcattccaggcagttggaactgcctgtgcaaaggccctggggtgagcacacatggcagttgacaagcatcaagaagcctgggttctcctagtggaaagttacagggtgttctgtgacagcatgtccactattagaaaagttgagtgagggattctacttgcgaattccctcaaaattcttcctgctccaacctttggccttctctgtggtcatcctgaaagtaaattccgtgttatggtactgtgtgaaatgtctgttgccctgagcacggggtgacctgcctgtttaatacgcgttgtggcggcctcgcacttccaggtttgtagtgtttccacattcattcactcgcgaaagccgtggtgtgagcagtgcagaaatgaatgtcttcaagtctgtctttcagatgagaacacagactcacatggtcaaatgcctgtccaaggcccagggttagcaagtagcagagctggggctcgaacccatgttctctgaccctccagccagtggcatttcccctaacccatctatactctcctctaaagtggcatctccagattgggtctgtagtagtctgctagggctgccataacatcaagtaccagactgaatggcttaaacaatagacatttattttctcacagttctggaggttagaagtccaagatcaaggtggcagggttgatttttttttgttgttgttgttgttgttgttttttgttttttgagaccgagtctcgctctgttgcccaggctggagtgcagtggcacaatctcggctcactgcaagctccacctcctgggttcacgccattctcctgcctcagcctcccgaatagctgggactacaggtgcccgccactatgcccggctgcttttttgtatttttagtagagacagggtttcacagtgttagccatgatggtctcgatctcctggcctcgtgatctgcccgcctcggcctcccaaagtgctgggattacaggtgtgagccaccgcgcccggcctgcagggttgatttcttccgaggcttgtctctggcttgtagacgctgccttctccctgcgtgttcacacagtcttccctctgtgagtgtctgtgtcataatctcttccccttataaggacaccagtcatattggattagggccaccttagtgacctcattttaactttaattagttctttaagggccctgtctccaaatatagtcacatttcgaggtactgggggttaggatttcaatagagaaaatttggggaaacacagttcagccgctaacagggcgctttctgtgctgtaacctggggcaagcctcccccacagcaggtaccacagccccagatgactctttgctgtagaaaatcaagtgacctcagtctctctctcaccctctgttttcttgctgcagctgattggggccctggtcctgtctgtgggcatctatgcagaggttgagcggcagaaatataaaacccttgaaagtgccttcctggctccagccatcatcctcatcctcctgggcgtcgtcatgttcatggtctccttcattggtgtgctggcgtccctccgtgacaacctgtaccttctccaagcagtgagtggaccacaccacccctcagccgggactccccaggagagctggggcgcctgcccctgtgcccttgggcagctcagtttcttttgtccctgcctcaaaccacctcctttagagagctccttagatcagcccatctgaccacactggcccaagaatgcccaggccacctcccctcctgcatgtaaaagctgatttgaatactgttcttacttaaactctgtgttcatctggatgctcagttgcgagtaggaaaaaccacactcaaatgagagcaagcaaagacaaaaaaaggagatggtagtgagtcattagctcatgcaaccagcaaacccacactgggtccaggggtttagatggcgccactgggcagggttgggcaatctccccagcccctgccagccggggctgctccctttgcagtggtcactgccggcgtcaggccaacaaagtccttatggttctagatctcaggaaatctttcctaccagctctggccaaagtcccaggactctggtgggcctggcttgggccatgtgcccattctgggatggggcatggggagtcaatcctacctgtatcccattattgtggggtgagggatgactccctaaagctgggggtagtgagtaggcagatccattcactctgcacttgtgtgtctcttgacctcattgtctcccctcatatgggaagcccctacgatccactgtaaaccgggtttgggtgctacttgaggctggaatttgctgaaatcagtttgggtaatgcctgctctctagtaaagggcagaggtgggggtgcatatcctctaagcttcagccatccccctcacccactgtgggggatctgggaagtcacatctgagggctctctgtggggagctggacatactgccccagcctgcccattaagccaggcctagcccctctggctcagtggcaacgaggcccagctctccttatggtggtgggggaagggcgtgctcttccacatagacccccaagacaaatggaggtaaccatttggctgggacagctgagtcactcttcctgccctccggctccagagacaggttttcctggggcctgcctgtccacgtccacgttctcacaggaggagggggcagaggcctaggagctggtaggagctccccgagggatgcttctctttgtgcttgctcttggagcagatggtgcctcccctgtaccccacacacgcccactgctcctctccaggtgagtctctgaattctgttttccagttcatgtacatccttgggatctgcctcatcatggagctcattggtggcgtggtggccttgaccttccggaaccaggtgggcctgtggatttgtgtatcggccatgtgtgtatggagcacccactgtgggtgccttgggctaactgggggtatggcagtgagcagggcagataacccccatggagctttcattctgctgaaagagaatgacaggcactgaacaagtaaagcagcgactaagaaaatgaaccaagctgacatgagagcgcctggggaggagatgggaggcccgtgctgaaatggtaaaaggagccagctgagtgaggtcccagcagagggaagctgagcagaaatgagcttagcatgtgagcaaaacagcgtggaggccacgtggctgagggtaggtggggtggagaggggtggaaggtgaagtcgaaagggctggccaggcagatcacagaggtccttgtaggccatgagttgggagcttggagttttttctagaggtgacaggagcctttggagagtcttatgtgggaagcgatgtgacccagtttatattgtaccatggctgctgagttggggaatggacagtgaagagttgagggtgtacacaggggcccaactgggaggctgtgggggtcatcctgggaatggggtaagattgcttgtaccaaggtggaggcagtgggcctgggccaaaaaggcgatttgatgtatgttttggaggcagtaccatcagaggctgttatgccggctagaggagtgaggagaggggcaggttgacagggtgatgcctggcatcctggccctggcagggtttgcagaatccgggccccttagagccagaaaggttctcgtggctcccggctccagctccttcaggcaggatgtacgcacctcatactagctgtgccaccttgggcgagttacttggcctcttggattattaggggacacctagctcacagatctgatgagagaatgcctgtgaaggactgggcacggttctggcacatagtggtcaaggccccacaagaagctggtggtggagcagggctgactccaacccagggctccatctttcctcccataatcttcttccttgtcctcatcctgcattgctgccataggtggggcttgaggagcaggacatgtttgcagaagccccattctctgtgtccactgcctggcctgtacccctccctaccccagacagcttggtcctggtgcatctggacagttgctgctgggacatgcgtcagagctgtgagccaagttatctttttttttaaaaataatgtttgtttatttttttgagacagggtctcactctgccacccaggctggagcagtggtgcagtcatagctcactgcagcctcgaacccctgggctcaagtgatcctccggctttagcctcccaagtagctgggactacagtcatgcacccctgtgcccagccaaattatctttcttttcagcagttgctcttaaggcagcaggtgctgtcccacaccctgggttgtgcagacctctcagatggcccaggatctggccctgtgaaaatgttcatgggagtgcctgtgattccagcccaggtgggagcagggaccacaccagttctgctggggcctcctgcagtgggacctaaccacaggcaagtctacaaacctggaatccagaggtcttcctgttttatgagccccaggaaaggggctttattccatttgcccatgaggctgcttctcccttttcctcttttctacctgcccctccctttgcctcttttctgcttatcagagcctctcttctgagctggcagatccagcatgctggttcactttccagcagccttgaggggagagatctttattccatttgcccatggggctgcctttctgtgcagccaccagagctcctggccagcctgcggctttccaggggctacgggttagtgctttcctggctggagcccaggtccagtttgtggccaactaaacagactcctggatataaggaggaatctccaccagcccgtgaccccgggcatggtttctgctgctaggcatggcttgacagtcagactgaagtggcttctccactcatacaggggcaagtggccatcctatcaatggagtcatggaggcacacaggagttaagaattcccccgagagcacacagcaaggcagaggtgcctcaggaatgcttcccagtcctgacttgctacctgcccctccctgtccctcttttctatttgtcagagcctctcttctgagctggcagatccaggatgctggtttacttttcagcagctgtgaggggagagatctttattccatttgcccatggggctgcctctctgtgcagccagcagagctcccggccgccctgaggctttccagggttagcactttcctggctggagcccaggtccagtttgtggtcagcagcgtccacggccttcataaactatcctccaatgatgggcagcagttctggtttctagtgcattgctgcagaggccatctgatttgtcattttccagtgccctgtaggtcaacagaacatcacctccttctttcaagtgatggagctgggctgagatgaaggctttggctggcggaacatccaggggcccttcagtgctcacagcttgggtttccgtgggcctgaggtcaggcctgacaatttctcatcatccccagaccctgcagatgctgtagtccgtgaagggtgctccttccccttgggtggtgtcccctcatgggtagggccttggtatgcagcccaggaagggtcctcactgacgcctctccgctgtttggaggctcaagccatgattcgtcatcttgaaaacttaaaaaatgagatacaaaattataaatgcagtaagatcgctacaatgaaaaaaataggtctacaaaaagacttaaaggaatggaaatatcagcatatgaactcatatttcctctgagggatgagactagggtgatttttctcctcccctttatatttttccttggctctcaatttttttttataatcaaggggaaaatatcacaaaaagaaaaataatatcccttccaactctaatgtgatatgattttgtaaaacaggagtcaggccagtggcggggatgggggaggagcggcctggctgttgatgatggtaggaagggcagtgtatgatggagaaaaaggtgaggagcaatcaaggtcagcttccaggaggaggtgatttcccaattccatttttccctgatcaagaggatttctctgagccacaatgtaacaagttcagtctccagtgccatgggccctggtaactctgagtatctacttatgaaaagtcagaacaagtcattaggtattgggggaacccacccccaatatttcaccataggttctttctattttccataagtgtcagccagctgagaaataaagagaaagagtacaaagagaggaattttacagctgggccgctgggggtgacgtcacattatcagtaggaccatgatgcccacctgagccttaaagccagcaagttttattaaggatttcaaaaggggagggggtgcaagaacagggagtaggtcacaaagatcacatgcttcaaagggcaaaaaggaaaacaaagatcacatgcttctaagggaaaaatcagaaactcctcataagggtccaacaaagatcacaaggcaaagggcaaaagcaaagatcacaaggcaaagggcaaaagcagaattactgataagggtctaccttcagtggtgcacatattgtcttgataaacatcttaaacaacagaaaacagggttcgagagcagagaaccagtctgaactcaaatttaccagggtggagtttcccaatcctgagggtactgcaggagaccagggtgtatttcagtccttatctcaactgcataagagagacactcccagagcggccgtttatagacctccccctaggaatgcagttcttttcccagagtgttaatatcaatattccttgctaggaaaagaatttagcgatatcttccctacttgcatgtccgtttataggctgtctgcaagaagaaaaatatggctctttttgcccaacccggcaggcagtcagaccttatggttgtcttcccttgttccctgaaaatcgctgttattctgttctttttcaaggtgcactgatttcatattgttcaaacacacatgttttaaaatcaacttgtacagttaacacaattatcgtagtggccgtaaggtgacatacatccccagcttacgaagataacaggattaagagattaaagtaagacaggtgtaagaaattatgaagtattatttgggaactggtaaatgtccatgaaatcgtcacaatttatgttcctctgctgtggctgcagctggtccctccatttggggtccctgacttcccgcaacaattaggctaaggattacatgttgggttctcagcgaggtgcacagaccacggccacagccaggcattgaaagctaaacagactcctggatataaggaggaaactccccctggctctgaccccaggcaagatttctgctgctaggcatggcctgacagtcggactggtgccgcttctccactcatagaggggcaagtggccatgcactggggagctgggcacagagcagcccttaggagcaggagaagtacgacacccctgaccccagccaggggctggaggaggacctgagtgacttccccagttgtgtgggtctcaaccctcttgacacctgcttttgtcccagcttgttctggggcttcttgtgagggtgtcaggtgtcagaggtgggcagctcctcatgcttccagccaggtgcagctgagcttggacacctggagggtccgggcagtagcgggtgtgtctataccctcatcccaggcctcctctctctaccaccagggtaggatcagtgggcattgtggtcctacctgacactgtggtcagggaacagtggggagcaccagcctgcctattttatcatggcactggcacaagctggctctgggcacaaccttgaggtcagaggcaggagaaagtaggcagcaccatggctctctcggccaacacctgaatatataaagttttcccttggtgtccgacggggattggttccagaacatgcccctgaccaaaggatacccaaatccacacatgctcaagtcctttatataaaatggtgtagtacttgaatataacctacacacatcctcctgtaaattgcaacactcctagattacttgcaaatacctaatacagggccaggtgcggtggctcatgcttgtaatcccagcactttgggaggccaaggcaggtggatcatttgaggtcaggagtttgagaacagcctggccaacacagtgaaatcctgtctctagtaaaaatacaaaaagtagctaggcgtggtagtgggcatctgtaatcccagctactagggaggctgaggcaggagaattgcttcaacccaggaggcagaggctgcagtgagccatgatcgtgctactgcactccatccagcctgggtgacagagcaagattctgtctcaaacaaaacaaaacaaaacaaaaaacccagatacctaatacattgtaaatgctgtgtagatagttgtttatgctgtattgttctttagtttgtatcattttttactgttgtgttattttttattgttccttttcccaaatattttccatccactgttgtttgaatctgcgggtacggaacccgtggatgtggagggccggctgtgtatccttcccacctacagcagagcggtcggccttacagaagtagagagtgcttctcgctggtttggccagactcccccacgggtgtgccccactgtggaaagctgtcagggagtgaggctggagcccccagtcccaaggacactgaaacataaccctctcccaccatggagatgaacctgtgaccctggccaggtctgaggaagggtctggcagatgctcactccacacgccccttcccaccttctcctggtcccctgggttctcttccattcctgattgtcacattgggcttctattgggactggagcagaggctagggtccgggggcaatgagggtaagtccccgttctagagggactgggaaaggctgagatgatggcttggctccaggcgcaaatgaaggaggaaaatcctgggccaagcacctctcctccaagtttttgttttgtttttgagacagtcttgctctgtcacccaggccggagtgcagtggtgcaatcacagctcattgcagcctcagctcctaggctcaagcgatcctcccaccttagcctcctgagtagttgggactacaggtgcatgccaccatgcctggataattgtgtgtgtttgtgtgtgtgtttgtgtgtagatgaggtcaagccatgttgcccaggttggtctcgaactcctggactcaagtaatcctcctgccttggcatcccaaagtactgggattataggcagggaccaccatgaccagcttctcctccaagtttgagagctaggcctgcactaggccagcagcagggccttcccagcctcaggtctcaggcttacatggaagtggtgttagccagaggcagcctgagggagccccgggccactccttccccagagaggttcttggtcctgtgcaggcagctggcctggtaggaagctttagcggccgccccttccactccttttcctacccctctgtcctctgtgttggaggagctgccgccacatgcctcacccccttcagttcctcattcatttaaaaaccctgagagaggggtgatgtggaggcttcagataaaaactagatttaaaaggcaaagctagaaaggatagttcttcatagctttctctggtgctttaaacaacatgctttcaaaccttgtggcttttgatgtttgcttactctttgcttaatttagcctggttttctagtcctcactggagctgcccctgctggcatggcctggtttggaggggaatggggtgggggcagtggcactgggtatgttgggcatctgggaatggcagaggaagctagaattctctcttccctgtcctctgagtggctcccctggtctctcggaacattaccagtgctgtcaacggcggcatagcactttacagttaaactgcacagccagcttgcctcacgggatcttctcacacacacccacccccaaccatcgcccctcacagcacaggaaccatctcagtgtcctcgtctccccggtacacatacacacgtgcacacacatacaagtggtgcacacttgcaagaaccagcatgcctcaaagagctccctgatgggggttgggggcagctgctgtccatgaagcccagggacatctgttgctcctgcagggccccccttcccccaacaacagggctcagcttaccagatgaaaggccgaatttttccaggcccctctcgaagcccgagccttggaaagtgcccaggaggcgggatggtttggggaggcgggatggtttggggaggcaggctggggctgctcaccagagaggcagagcctttccccacagccacagagcagcctctactctgccacttcccctccttcctgccctgggcttcccaccttcatcccaccctgttggcagccctgggagagtccaaacagcacagtggccagtgggggtgctgtaagtgggccagtgggcccgggtaggtgcagagggacatggtgggccaggactgtgtctgtggtgccttgagagtagggggaagccacccgggaggaacctccccacgtgtggccttaggcaaggccctgaccctggcggcaccccatgagtacgtagctcagccaatcatgtcgttcagtgctgtaagctcattcccctgccccaccctgggtggcagactggccccaccctggtatcctgttttttaggcacccccaaccacaccccagccagctggcctgtcccttcatcacccagaggagcaggcacccaaggatggaaaagctttgtgacctgggggcctctgggaggtgggcctggggccaagagagtccttgttctgcccaggctgctcggctggaaggcaatgctcccacccaacttctgccccgggggccagtgccaggtccgcgaagggccatgggctggtgagttgacagctgctcacaggagcctgcatctcctctcttctcttggggctgactccagtcttctgcaatcccaggcctgctccagagctgctgtttatcatcagcagaggactttccttctggccacgaaggccagtttctccgagcccatctccttttttttttttttttttttgagacagagtcttgctctgtcacccagtctagagtgcagtggtgccatctcggctcactgcaacctctgcctcccaggttcaagcgattctcctgcctcagcctcccgagtagctgggactacaggcgcacgctgccacgcctggctaattttttgtatttttagtagagacggggtttcaccgagttagccaggatggtcttgatctcctgaccttgtgatccgcctgccttggcctcccaaagtgctgggattacaggcgtgagccactgcgccaggccgccctgctaatttttgtattttcagtggaggcagggtttcatcatattggtcaggctggtctcgaactcctgacctcaggtgatctgcccacctcggcctcccaaagtgctgggattacaggcatgagccaccgcgccaggcctccatctccttctttaccttggctttgagcagagcgaggctcggggaggaggtgggtgctgcagtctttgttcctcttttcctgatcctggagataattttgggagatggccccaaacctgaaccttggtttcttagcaccttaaagtgtgtcaggctgggagtttgacaccctggtcccagcgtctctctgccagtggtgtgctgggcaacctcggactagccacatcgctctctgggctgcagggtgttgtgagagtggggttggccaggactcgtgcctcagaggctgcctccattgcagtcagttttttgaacaagagttggggcctcggtttcccacgggatttgttttccaccaatgacgtgggtgtgaagtagtaccatagagtatttgtctcctttaaaaacagacaaaaatcttgaataataacaccaggacctacaatgtgcctggtgtcctgctaaacaccttcacagcttttgtttatttaaatctcacaacatccctatgaggcagagagtgttttcctcctgattttgcaggtgagcaaacagaggctcagaagttaaaagaagtagcggaggcccaggtggctgtagggaggtgtccttgattatgaggcttgacagcccctctgagacttggtttttgattctcagagctcgaagttaccttaaagataggcctacgggtttggttcacagttgggaagctgaggcccagagaggagaagtaagccgcgatggggcctggaaccaggatcctgttgtcccagcgtacgctgtggtgccacccccgggaattgtctggctcttcagtctggcaccggagccgagaatgcccccttcgtccccagtctctgctgatactcgacctccgtgctctgaaagctgcgattgttacagtgagctgggctgcccacgctcctgcccccgccccttcccactgtggggccctttgtgcttctgggtctcagcacaacagccgggctgttgatccagaaagcgcagcgtgactgggagagggcggcctgccatgttcctcccggcagggattgtcccagccctagccgagggggaccgagtgctgcagtgatgaggagaacagcccatgagggaggtcaggagacctgaattccagtcctggcaagaccccacccagcctgctctgtgacctcactccctccccaagtctcgagctcctcatctgtaaaacaagaggctggatggtggaggagtgtggagaggggctctggagggcaaagggaagattccagcgtgggcccatccctgggcggtagaaagagcactgggcctggaaccaggacagccaggtctcagctcaggcatggcggcatcagagctgtgtgtccccaagcacggccccagcctctcagggcctgggctgtctggtctgcaaagggagtggagtgaattactcctgctgggacatagcacaggcactcaggcatcagatgaacactggaggcacggggaggatgtgtgggtagggaggtcacgggcatccagggtggggagtggagggggctccatgctggctgggcgcgagctgcattggcacaaggcattctctacccatccaggcttctggaaaaccttgggttggactccgggagtgtgtggttcttttcctttgtaatttctccttttgaatagaccattgacttcctgaacgacaacattcgaagaggaattgagaactactatgatgatctggacttcaaaaacatcatggactttgttcagaaaaaggtgagccaggcgctttggggtagagatgcgcctcccgtgctcttagccccccattcaggcccctgctcaagaagatggggtgagggaccaggtgacttatccattcccaaagcaggtggctggccagattgggaggcaacagtgagcatggatggcccaccaaggatggggaagccagggcccaacctattcagccagtcctctgcccacattcctgacccaaaaccttcacacccttctgttcctctccagttacactggcttcctgccccatacccccaaataaaacaaagtcaggtgttgctacaagcaaccttgcagggtcccagggcaccaccctccaatgggcaaggatcctccttccttgaggtgtgagcaacctcaaggggagtaacctaccccagtccaaagccccctctgccaagtctcttcagtgacaactcactccttgtcaagttaaagacatccctgattgggagaaagttcttcactaatttcagtttcccccaaatatgggacagtgaaccagacgcctctcttactttcatgacacttccttgaatgtgatgatgatcctattccttttgggacaccatctctcccctctaggtccacccaaatctgttggtgcaataataataataataataataataataataataataataataataataatggcagtggtagggccagctgctgtcctgggtggcttttgtacatcaacttcacttggtcctgagcctcagcttcctcacctacataaggggaataatgacaggagctcttggggcgtcgtcatgaggattaccttgacttaattcaggagacgtgcttagaacagtgccaagcacagggtgagaccacagtgccagctgtggggatcattggtatgttctcctgggtgaggacaagtagagtgagggctgcaggcccactcagccgggacagcacttcctgggacataatcttgggggcctcagctggcctggatccttgtgccagctctcagtggggactagcctctccccacatgcagggccacttgctgtggccgctcccttggcccagactttctcttcagtcacaacaggtgcagcctctggaaggtctttttctgccagggatgtgcctgccagcttgggctgggagagctgacttctgctccgggtggagtgagatgtttttattggaaccagcctttagctggcttggggatttcatttctcctggcatagaggtaggaggtgattaatgctgaatgggcacttgcttggtgccaggtccagtgctgagtgcttcatgcatggcactctatgtaatcacagctcagctgtgcagagctgccatccttattcttgctttacagacaaccatctgaggctcagagaggctgaccaacttgcctgaggttgcacagcagggagtggtggtctgaggatttgaccttgggtctgttccattgcaagacaaatgccctttgaactacattgcagaaagacagttctaggtcccaaaacctggtggcttaaggggcactgtggggactctgaaaggtgtctggctaccaggacgtgtactgcagccctggttgagccctccagtcccagctccctgcttcagctggctggcaaagctttgcatggtccagcctgtgccgccctttcatcctcatgctctgcactctctctgttccaggcttgttggcctccgcacctgctgctgaaatacaagcttgtttctgcgtggggcctttgcatgggtcgtctggcttctttctgtttccatgtttcagatgaaatatcctctctacaaagagccctttcatgacctgccaacctagagctgcccctccccactttccccctatttctccatttccaggttgcacagcacctttccatccagtgctcactctctgtctctccactggaatgtgttccacctgagcaagggctgccttgcttttgctcaccctgtctctccagtgcccaggacaatgccaggcacataccagccatcaggagggttaccaactacttcctacaggagcagggaggggaggcagggaggggctcggctaaggggagagctccaggcaggttgtgaggtgtgggtgctctccttgctaagggcagggccagctgagctggacggggtggctcctagggtgggtgcgaaggttggttgaggtgcagggactttcacagaatcatgcttggtctctgggactttaagggccatcttttccagcctagcacctgcatttggggacacgaagatgaagaaagtggaggccagttgtcaaggaaggacctttcctcccagtgcctagtcactaccctgatatcccaccaagaggcagcccagccttggcttccatacctctctagtgacagggggttcactaccctctaggcagccatgccacactttgacagctctgacttgaaagtgtacagcctctccctgccccagggtgacccacataataaactgcctccgtctcctgacagggccccttcctgtcgtctgagcagggcctgggcgatgacggcagctcctctttcctgcttgcttccctcagttcaagtgctgtggcggggaggactaccgagattggagcaagaatcagtaccacgactgcagtgcccctggacccctggcctgtggggtgccctacacctgctgcatcaggaacacggtagacactgctcctgtggggactggggggctgtcggggaccccaggtggtataaatgttctcttttctctcttcccaacttgaagatgggtggtgtgggtggatggcagggaagtaggagttggtggcagagcggaggctttcctgattctcaagggctcctgaaagtggagcttctgggggtcgggggtagggagaccatgtctttcttagtggtgttggttaaaatctattgagcacctaccttgtgcaggcctgctctgggcactttggtggtatttactcatttagtattcacgacaaccctgtgaggtatgtactgttattttacccactttacagatgaggaaattgaggcactcaaaggctgggtgtcttgcccaaggttggcagggctgggatgaagtgcaggcagctgttgcctgagctacactctggagaactgtgcaggccaggtgagggcaggagggagaggtgcccaggccaggggagcttagcgggggtagctggctctgcagcattagtggaggcaggcaggacctgcaccttgggcatctccattggtctttggccttgaggtcctggtgatcatcagcagcagagtgcttggaagggggtctggtgacgtaaatgccatcctcttcctctccccagcacgatcctctcgggtctgtcaccttggtcatttgggatgatgtcttgtgttgtcagcgcttaagtgaaaggcttcatcagtccttgtgtttgacaaatgtgtccagaaactgtttcaggattggaacgaggtggagagctttgcaattactcatggcccagatagtcatggaaagtttttctcctgacattgccaccattctgtgcccactgctggattctgtaaactgagcagctgcgggtgggggcctcgcccatgagtcagagagccagtgccaagtgcactagctctaaaaaaggccgggccaggagggaagctttgtttggaagtgttagctgccattttagggtagttctctgggaagtggggtgctgaggagtagcagagtttccagagaggcctgcgtggggtgatcctgaacctcatcacccagggcagcagcatctgaatacctaagctgagatgtggaagccaaacttgtattcattcattcattcattcattcaacaaatattggctgagaacctactctatgccagacacatttccaggttctgggggtgtagcaaacaaagtctctgcccgcaaggaggtgacatcctagtggagaaaactgacaaacaaaataagtaaaagatagaggatcataaatgctgagtagaaaaagaaagtagggcatggaggattgcagtttgggatactgagaaaggcgggatctgggtgaagctctgaagaaagtgaggaaggtgtctgggggaggggcattcctggcagcaagaacagctgtgcaaaggccccaggtgggaatcaccccagggcgtttgagaaatgcacagagtggctggagcagagggagcacagcggaggatggtaggaggtggagtcagggaggtcatgggtaccccgaaggccacaggcaggactgtggggcacccttgagtgatggaccatacagggctgcatggaagaggggcactctgacttggttttacaagaatcagtctggctgttgtgagggacatgctagatgcagggatagagttaggggctgatatgcagtgatccaggggtcataggtcatcttgtccaggaaggtgctcttggatcaacacctgtggaagtgggagccagaagcgggattgggcaatgaagggagttgagcagtgatgcagcctcagctcagttcggctggaggcctcagccacatctatgaggacagcccttcagagttgtcccctactggggtgagggggccaggccttcacactcccacccacattgaccaggcattgcatgagtccagtggtccacccaagaagggacttgctggctctgttcagccaagaacagactaatacagcaagaggaaagagagggattgattgatgataaggaattggcttgtgtaattatggaggcgggcaagtcccaagatctgcagggtgagtcggcaggctggagacccaggagagctgagggtggagttcccattcaaaggctggtcaggcttcaaacctaggaagagccagcatttcagttcaagcccgaaggtagccaagcagggagaattctcttatggtcactgaggagagggcagtcttttgttctgttcaggccttccctgatcagatgagacctctcccccttgggcagggccatctgctttacttagtctgctgatttaaacattagcctcatgcagaaacacccccacagagacacccaggataatgtctggccaaatatctgggtatcccatggcctggtcatgttgacatataaaattaatgatcacatgaagtagttattgcagggggctgacacctaagggctccccacagcatccctgcaccagggaggggaagacagatgcttggagctgggtggtggtggtggtggtggaagtggcaaaccgtggtgacattctggctgtattttgcaagtaagcctacaggatttgctcgcatagcagatgtgggcgatgaatgaaagagagaaatcaaggaggatacccaggttttggtctgagccacaggaaagacggggctgccactgcctgagaggggaggactgcaaggaggcaggctgggtgaccaggagctcaccgtggacgtggggggtttgagagcctgttcagcatcccatcaggggtgtcaaagatgcggttggatataggagtctggagttctgggaacgactaggcaaggggtgtaaacacggacatcatctgcagatagggtagaatctaaagacagcatctgaatgagagcactgaggtagggaggagccttcccctggccggggttatctgaccctgtgttacacatgaccattgagtctccctgtgccaccacacctggatgattttctctaaatgtgaaacagggcgttcgcttcctccatagaactggttgatttgtgtccagatctatttattttacactgtactattcaacctgggatttgaatgagtacacgggaaatatgtagtgtaaaaaactaaaatagcattaaaaatcaggactgtgggaattgtattctcagataggaggcctagatgatggagaaaaatataaaatcctgctatctaagcctcaggacctcatggactcactgaaaaggagctgagcctcgtgtctggtggcttggagcagggctcccctacctccaggccatgaaccagtaccggtcagtggcttgttaggaaccaggtcgcacaacaggaggtgggcagaggttgagggagcattgccacctgagctacacctcctgtcacatcagcagcagcattagagtcgcataggagtgtgaaccctattgtaaactgtgcatgcaagggacctagggtgcatgctccttatgagaatcaaactaatgcctgatgatctgaggtggaatggtttcatcccgacaccatcaccccccacccccccgcaccccatcctgtggaaaaattattttccttgaaaccagtctctggtgccagaaaggttggagaccactggcttagagtttcctggcaaccaaaaggaaaagggagacatggtctgttacattgttactgttcagcagaacataccagcagaacataccagttcttcagggaaagtaaccttttccctaacactcagctttaaaagaaatgtcttatatgagcttccaatagaggatttgagccatagaagttcacatagggctgtaaaatctggttataccaggatatatccctcggagatgttggtgcagagggcagcgtgcttctacattaaatggctccagactgctgtgcctgctgagctcttgggaccaattttcacgtacctcccctcccttgttgttggctaccccttgggggcctgtcgcgaaggcccctctccctgtccccattagctgctcagtcttttcagggtgagaggatgcacacacaaacattgctgtgatcttctggctgcccaggagtcccccttctgacttcctgtcctgtggccccgtgcaggatggaagaggctactggaccctggtcttggggcctgtgaacttcagcagagcctcttgcagaatatcgattctatggtcaggcaggtaaacccaggcaggctttacttttggaaagactatggatgcatcgtatcccctcaccccttggtgaggggctctcctggcagggtgaggtgagtcccccctgggcctggagaagggttctgggctctgatgccagagaggcctctgccagttgcctgtgtgctaagagactcatcccccgaggtcaccagagctggcccagtgaagtcactcttgtcacctccctacgtaccatgcagcttacctatttgttatgttcattatctccctttctacagtgtaagttccatgaaggcagggactttgtcttgttgttctgtatttcaagtgactagaactgggattgacatgcaataggtgctcagttaatatttgttcaatgaacaaatgaatgaaccaatgagatggaaagcactcactcccatcatgtgcccgtgcacctgctctccaggcctgaccctctccataggggttgtgtttatggcctggaagggccaaaaacactggctgactaatgcccagtgggcactgggcatggctgggactgaggctacctggagaaccagctaaaccgagggaggtcgtcttgcctgcacatcaagccctgacatttagaatgacctagatgacatctgaggcccaaccctctctcggaaggagagaagacaccctccctttcctttgcaggggctggaattgtgaacaaatcacgccagccagcattcttgtgctcctccatgtgcccagccccgtgataagcactttatatgtgtatctcactttatgtccaaaacagccctaggaggtgggttctgtgatcatcacaacctattcattcattcattttctcagttaacaaatatgtattgagtacctctgcgtgccagttccttagcagcccacctaaggttgggctctgctcctaagtggcagagcaagatctggacccaggaaatgtgacaccagagggcacgctgggggctctgctgttgccctcctgagtcatcactggcgcctgcagcactcacggcagcgttcacttacatgtagagcagcggggctgggggggacggtcatgggctggaccaggaagtctcactctcttccctggtggttggagaaggagaccctgcggggcacaggtggtgatgggaagtgcccgcggcagcctgtgagttagggcctgcctggggaggggtttgatgaggtctagggcgtgaccacaggtttccctatgcctaaattaatcagtagtcgggagttctggagagcacctctcttcccaagaaggaagttttggcagcactctccgctggtggagcagtggtctatggaacggaagcatggccaggggccctgccctggacctcaggtaaaccacagctgaccctgtgccagctgtagtctgaagttttcctccccaagagccagcggcgcaggaacagccccaccccgacctctgagacggtgtgagcaaagcggtgctctggggcggtcatagcccgggagcgtgggcagcacacctttctctggggtcctgatctgctgctagtggaggggtggttctcccaggtaaaagtcatggaacctgcattcctacagttttttcacggggcatttcttggaggaggaggtggttatgatggagactcaagccagactgcctgggtcggaatctcagctccatccctgctggacggtgcaactctgtgcttcggttttcatctgtaaaatgggtaggataatagtgcctttttgagttagaaccattataaatattagctattatacatttccatttcagacagaagttgtcaacaccatgtgtggctacaaaactatcgacaaggaggtaatgtctttgaaatgcctttccctggaaatgttgctcttcctggtccaccctggggtgatcggaggggtttattgaggtcggggtcctggccactgagattttcccacattcctggctgtgacccagagccaggactgctgtggttttccaccccagcacagaagggctcagggaaccaagaattcccccaggctgggagatgccgcctgtcagggtttgccgagcacctactgtgggctgttccacatgaagccaccacggcgcttcctggtacccgcagcgtgctgtgtgcccagccatgctcagcaccagcttgcctctgcccctggggccacctgggacccaggagtcctagaggatggtaaccccctctgggggttgctcctgggtcagcttcctgggcaacacccctggtctaggagagaagcaggggtggtgctgagaagggacctaaaaggaatagtgacctgacatgcagagcagtggctttcaaagtggggtccccagtccagcagcaacagcatcccctaggaatgtgagaaatgcacattcttggtatggggctagtgggtgattctgacacatgcttgagagccatagaccagcagtggttctcagcccctcagaaccaatggccatttttataacaaacagtggtaatgtcctatttattatccccaagtgaaattcacagataacctacctacatgcccaattccaatacaattaacataatgatctgagataaagtagaaatgaaatacagcaatttacagctgtttaacatagttcatcatgtaagtgcttaggcagtggggggtgcagaagacacaatgtagtcaggtgtctgcactgatgtgaggcatccctgaggctgtagtagctacagggcagctgatactgggcattgtgttggcgactcacataccatgggcatcatttttgccactggcatggtttttaaaaacggtgaacaattcttgataaagttctgaattaaataatgtgtaatcattccttaatttacctagtagtacttctggaaaattctttgtatattaaaaccaatgcagaaatgctttttttttttttttcccttaagagacagacagggtctcactgttgcctaggctggcctcaaactcctaggcttaggcactcctcccaactgagcctccatagtagctgggactgcaggcactggccaccatgcccaactctgctttgttttttatatgtacctggagtggggctattggcttggataattataaataggcttttcatgtatggaaaacatccgtgaggcttttcatgcagggacatctgagaagcacacaggcagggcagttgtttgtggagtaggattaccctgagctctgcagtccctcagccgccaacctcgtttgctggggcaaccaaaagtgccaccacggtgtccccagtcctctctagagaacagtactgtccattaagaatcagaatctagggtcaccttctcatgctgcatatgggaaactgaggatcacagcggttgagggactagcctggaccttgtgtacatggcagagtcggggctgtggctcctgccagccgaggtcctctgctgggctgacccagctccttcccatgcagcgtttcagtgtgcaggatgtcatctacgtgcggggctgcaccaacgccgtgatcatctggttcatggacaactacaccatcatggcgggcatcctcctgggcatcctgcttccccaggtgggcaggccgtgggttcagagaaagtgtgacttggtgattgcagaagggcagagaaggtgcagaggggaagagcgaagaggcttttttcatagaagtccaggacttgcctggggagggctgcatggctggaaggaggggcaaatggcaatagcagtcgtggcgaagctcttccaagtgctgcgcaggcactgctgcttcacttctttttgtgagggaggcactattataatgcctatttcacagaggaggaaactgaggagcagcaagcttcagtgacttgccaagatcccctagatagtgtgcagcagagctggggtggaggcaggaatcccagaagggaggggcccttgctgatggggcacagcgaggcgctctgggatttcctgggaaggggagagggggcccaggtgggagcttcttgggcagtgtgggtgctgggagaagtctctgctgtgggtgttgcccaggtcacacaggaccatgagggcttgggactggctgcttgggtttctgggagccgggagctgcagggagggctgccctgattcccagcaggccctcaccagccctgccccttcttctcagttcctgggggtgctgctgacgctgctgtacatcacccgggtggaggacatcatcatggagcactctgtcactgatgggctcctggggcccggtgccaagcccagcgtggaggcggcaggcacgggatgctgcttgtgctaccccaattagggcccagcctgccatggcagctccaacaaggaccgtctgggatagcacctctcagtcaacatcgtggggctggacagggctgcggcccctctgcccacactcagtactgaccaaagccagggctgtgtgtgcctgtgtgtaggtcccacggcctctgcctccccagggagcagagcctgggcctcccctaagaggctttccccgaggcagctctggaatctgtgcccacctggggcctggggaacaaggccctcctttctccaggcctgggctacgggggagggagagcctgaggctctgctcagggcccatttcatctctggcagtgccttggcggtggtattcaaggcagttttgtagcacctgtaattggggagagggagtgtgcccctcggggcaggagggaagggcatctggggaagggcaggagggaagagctgtccatgcagccacgcccatggccaggttggcctcttctcagcctcccaggtgccttgagccctcttgcaagggcggctgcttccttgagcctagtttttttacgtgatttttgtaacattcatttttttgtacagataacaggagtttctgactaatcaaagctggtatttccccgcatgtcttattcttgcccttcccccaaccagtttgttaatcaaacaataaaaacatgtttttttttttttttttttttgcctttcctgtgtgctgttttgttggggcgggggtaaggaaggctgcaacctggatttggaaaccccttgtggatgcgaggatgaagggggtgcatggggtgaagatttggcatagcttgggatacaggtggggggttggggggaaagcctcagggccagaggtgaccacgcctattttaccgagaaccgagggaaacagcctgggccaggtacagcatgaggctccacctccaggaaatggggtggatggggtgggggaccagggaagcggagttgcccacaggtccacctaccgcgctccctgcagccctcagtgtgcctaatggctgccgcgcaacgcatgcagagcgtggtgtcggtcgacccctgctggagatgccgggacttgcgtgcgtcagtccactcaaaccttcgggccagaagacatgggatctagattttttgtgaggctcttagtagccagggcaatagaaataaagtagcaagaggccgggcatggtggctcacgcctgtaaccccaacactttgggaggctgaggtgggccatcacgaggtcaggtgttcgagaccagcctgaccaacatagtgaaaccccatctctactaaaaatacaaaaattagccgggcatggtggtgcgcgcctgtagttccagctactcaggaggctgaggcaggagaatcgcttgaacccgggaggcggaggttgtggtgagccgagatcacaccactgtactccagcctgggcaacagagtgagactccatctcaaaaaaaaaaaaaaaaaaaaaaaaaaaaagaagaagaaataaagcagcaagagccccaaacctgaaggattctaacggtgggaaccatctacacacccagtagttaagtggtcagatgcttggtctgccatgggtgccaaacgcatgtgtaagaaggggcaggaggagggtattttaaagtatgcaataacacaacaataacaaacacaccatagagcatactttgccaggaacgatattaactcctttaatcctcacgactagggtaattcttatcttcattttattagtggggaaactgaggcacagggcagttaagtaacttgcccaggcaggcagctggtaagtgacaaagccatgacttgagcccagataggatctcttgagccactcagcccctctgctttactgtctctgttgcctcctgtgcacacatggtactaggcatgcaaaaccagtggaggctgcagctgcttctgaagctctgtcctggggatattcactgtagccgctgctgcagcctctgtcttgtcccactttgacctaatggacacaaggccaggtcaagctctgtgtctggctggaggccttgtagtcctggggctctggctgttctgagaaccccttttgtgcccagaggggagacggcagctgcctttaggggcagcaggatggcagaggccccgtaggagacaggctggtctgaatcgcttatccaaggtcaccttacctggaccctggaacccggaccccttgtcttccctctttccagcaccactcacagacacccctctacctcacactgcaccgctggccagctgcttatgtggaccagcgctggtgccacagatggctaagctccagcagacactcatctcctcttttccaaaccttggtcactcacctctaaagaaatggaagcataaatatcttattttttttgagaagtgtgtgttcatatccttcgcccactttttgatggggttgtttgattttttttttttgtaaatttgtttaagttcctttaaattctggatattagctctttgtaagatggatagattgcaaaaattttcttccattctgtaggttgcctgttcactctgatggtagtttcttttgctgtgcagaagctctttagtttaatcagatcccatttgtcaattttggcttttgttgccattgcttttggtgttttagtcatgaagtccttgcccatgcctatgtcctgaatggtattgcctaggttttcttctagggtttttatggttttaggtcttatgtttaaatctttaatccatcttgagttaatttttgtataaggtgtaaggaaggggtccagtttcagttttctgtatatggctagccagttttcactacaccatttattaaatattaaatagggaatcctttccccattgcaggtttgtcaaagatcagatattgtagatgtgtggtgttatttctgaggcctctgttctgttctattggtctatatatctgttttggtaccagtaccatgctgttttggttactgtggccttatactatagtttgaagtcaggaagtgtgatgcctccagctttgctctttttgcttaggattgtcttggctatacgggctcttttttggttccacatgaaatttaaagtagttatttctaattatgtgaagaaagtcaatggtagcttgatggggatagcgttgaatctataaattactttgggccatatggccattttcacgatattgattcttcctaaccatgagcaaggaatgtttttccatttgtttgtgtcttctcttatttccttgagcactagtttgtagttctccttgaagaggtctttgacatcccttgtaagttgtattcctaggtattttattctctttatagcaattgtgaatgggagttcactcatgaattggttctctgtctgttattggtttataggaatgcttgtgatttttgcacattgattttgtatcctgagactttgctgaagttgcttatcggcttaaggaaattttgggctgagacgatggagttttctaaatgtacaatcatgtcatctgcaaacagagacaatttgacttcctgtcttcctatttgaataccctttatttctttctcttgcctgattgccctggccagaacttctaaccctatgttgaataggagtggtgagagagggcatccttgtcttgtgctggttttcaaagggagtgcttccagcatttgcccattcagtatgatattggctgtgggtttgtcataaatagctcttattattttgagatatgttccatcaatacctagtttattgagagtttttagcatgaaggggtgttgaattttattgaaggctttttctgcatctattgagataatcatgtggtttttgtcattggttctgtttatgtgatggattacgtttattgattttcgtatgttgaaccagccttgcatcccagtgatgagctgacttgatcgtggtagataagctttttgatgtgctgctggatttggtttgccagtattttattgaggatttttgcatcgttgttcatcagggatattggcctgaaattttcttttttttgttgtgtctctgccaggttttggtatcaggatgatgctggcctcataaaatcagttagagaagagtccctctttttctgttgtttggaatagtttcagaaggaatggtaccagttcctctttatacctctggtagaatttggctgtgaatctgtctggtcctggcctttttttggttagtaggctattaattactgcctcaatttcagaacttgttattggtctattcagggatttgacttcttcctggtttagtcttgtgggggtgtatgtgtccaggaatttatccatttcttctagattttctagtttatttgcatagaggtgtttatagtattctctgaaggtagtttgtatttctgtgggatcagtggtgatatcccttttatcattttttattgtgtctatttgattcttttctcttttcttctttattagtcttgctagcggtctattttgttaatcttttcaacacaccagctcctggattcattgattttttgaagggtttttgtgtctcttatcttcttcagttctgctctgatcttagttatttcttgtcttctgctagcttttgaatttgtttgttcttgcttctctagttcttttaattgtgatgttaaagtatcaattttagatctttcccactttctcttgtgggcatttagtgctataaatttccctctaaacactgcttttgctgtgtcccagagaccctggtacgttgtgtctttgttctcattgcagggacatggatgaagctggaagccatcattctcggcaaactgacacaggaacagaaaaccaaacaccgcatgttctcactcgtaagtgggagttgaacaatgagaacacatggacacagggagggaaagatcacacactggggcctttcagagggtggggggctgggggaagatagcattagagggaatacctaatgtagatgatgggttgatgggtgcggcaaaccaccatggcacatgtatacctatgtaacaaacctgcccattctgcacaagtatgccagaacttaaagtataaaaaaaaatgaaatggatggaagcagagtacctggagagggctttgtccatcctgtggttgaggactccctggccatgacacccttttgtgctttaaagccaatgaatgacattatcttggcctcttgtctcacaaggatggaaccataaatgagtcctttcccacaccatgacacacatagaaaataataatatttgtgcagcctacatcatttgtgaagttgaggaggtttgtgggctttgctttttgatttatttgttaataattattttttataagacacattaaggaagactgattttgtataaaaatgtccaataccatattcttgaaatatatttttaacaatttatggaggtatactggatataaaataaactgcgtgtatttaaactgacaaatgtgtcagtgaaaccatcactacagtcaagataatgaacatatccatcactctaaaaaatgtcctcttgtccctttgtaatctgtttattatagcccttcccaccatccacagcctatgcttaagcaatcagagctctgctttctgtctctataaattacttggtattttctaaaatgttatataggtggactcatacagcatgcactctttctgtctggcttctttcactcagtaatcattttaagattcattcattttgtagcatatatcagaagttcatttctttttattgcggagcagcatactgttgtatggatacaccatggtttatttatccattcacctactgatggacgttttgtttccagttttttgttgttgttacaaataaagctgctatgaatacttgtgcatgtgtctttataaaaacacatactttcatttctcttgggtaaatatctagaagtagaatggctggattatatgtaactatatgtttaactttttaagaaactgccaaactattttccaaagtggttgcacaattttgtatccccaccagcagtgtatgagagttctggtttccctacatccttgccagcagttggtatggccagtttttcttagtcatgctaatgggtgtgtggtggtattttgttgtggttttgatttgcatttccttaataatcatgttgagtacttttcgtagacatatttgccatccacataatttctttgctgaagcgccttttgaaatattttcttaaaaaattagattgtttttgtattattgaattttgacaactctttgtatatgctggatacgggtccttgattagttatatgatttgaaaaatttcagtctgtagcttgtcttgttctctctctctttccttcatgtagagattgggtctcacaccattgccccggctgcccttgaactcctgggctcaggatcttcccacctcagcctcctaaagtgctgggattacaggcatgagccaccgtgcccagtctgtggtgtgtcttttcagtctcttaatggtgttttccaaaaagcaggagtttttaacttgatgaactccaacttatcaatgttttctttcatgcgtgatgcttctggtgtcatagctaagaaatgtttgcctaaaccaagatcacaaaggttttctcctacattttcttttaaaagttttatagttacgttacaattatgtaacgctcttacatttaagtcaaggattcattttgagttaattttctaatatgctacaaagtacgcatcaaagttaatctgttttgtacatgcatatccaattgctccagcaccacctgttgaaagcagggatgaatttccactgaattgccttggcacctttgttgaaaagcaattgtccatgtatctgtaggtttacttctggatttctcactacgttttggtcaatgttgtatagcaaatgtcagagcagacatccttgacttggtcctgatcttagggggaaagtgttcagtcttttatcattaagtataatgttagatgtaggtttttcatggacattctttatccaggttgactaagttctcttgtatttctagtttactcaacatttttgttgggactagatgttggattttgtcaaatgccttttctgcatattttagaatttgcgaatatggtgaatttcattcattttcacatgctgaattaaccttgcattcctggaataagccccattcagtgatgatatagtacccttttaatatattgttggatttggtttgttgaaattttgtttaggatttttgcacctttgtttaggaggattgttttcttgtaaaatctttgtcacattttggtatcagagtcatgctggcttcatagaattagctgggaactgttccttccttttcaattttctggaagagtttgtagaattggtggtatttcttctttaaaagtttgataaaattcactagtgaagctacctggaaaatcttctttgtaggaagattttaaactataaatctaatttctttaatggatataagactacttatttcttcttgagagctttggtagttttttccttcaaggaatttgataatttcatctaagctgtcaaacttattgacataaagttgttcataacactcccttattattctagaatctgtagtgatttcatctctcttattcctggatattgacaatttgtctttttttctcttttccctaattagcctggctaggggtttatagattttaaagatcttctcaaagagccagctggaccattctcatgagcatataaataagctcttagtattcccatcttaaacaaggatacagacaagcaaggccctcctgatgatttctcctctccggcccctgccctgtctctctttcccttcatagcaactgctttgaaagtgtctgtcctctctgtttctggttcctcttctcccatcattcttggacctccctaattagactcttgtcccacttgccccaaattgctctcatcaacatcaccagtgacccctgcattgctaggtcctatgtccctgtggcatttctcagcttcttggcttgtctgccacatgtggccagttgatcattctctcctccttgaaatgccttcttgtttttcctccaagagaccaaccttgcctagtttttctcttacttctgaggccccctcttatgagtctcagttgttgattttgctttcccaacctcttagcatttgagggcctcatctgtcttttctatccacaatcccttgttgacctcatccagcctggaatttgaggtcctatccaccactctagcctcagtcctgggtccctgctctagtcagcaggtcgccagggctgactcagttcattcgtagctcacacggttccatctgtcctctcacaggaagatccagctcccaccactttcacgtcctcccccaccttcccatctcctctgaggctcatttcaattcggtgtgtggagggacttcttttatgatcacccattttgcaggagaggaaagataaaggccagactagcttagtaagttgcagtccaagaggccctgccagcaacctcagatcctgactccttccaagctcttgccttggctgccaccttcctggggcctgagaagcacctggaaatattatggggccacaagctctggcacaaggtcctggctttccacagctcgtgaccccttggagggagcctgatttgcagtcctaaagcccaggcagaaggcacaaacgttcccagcaagaaaatgagcagagctgacatggggacatgtggtcgctaggtggcgcggctgacccactacttggcagccagcactcagcaactccaccctctccactccctagagcctgggcacctgcctgggtggcagcaggagtctgctttccgccccctaccccaaaagagcagaccacaaggtgagggagcctaaaatactataggtcctgattgtagtaggtgctcaataaataattattgactaaaagagtgatcattttgtgaagttcggatagatgagactttcccattcccatttcataggctgggaaactgaggccggatactaacgataggagtagcaaccaaggttactgttatcgactctcattcggtcactatgtaccaggcatttgcttagcacatttcattcttcatcccatttagtcatcacagcaaaaaggcagggcctttatgatttgcatttggcaggtaaggacataggggcttagagatcagctgacttattcaagtcatacagttagtggaataaatggaagaaccaggatttgaaccactctgcctgcatctgagtagctgaataggatcagggccagtgctgcctccttcccccaccaataggatctgaggtgaagtgccccagcagtgcctccacctgggcatcatgtggccaccagagggaggcctcggtctttagacagctgcagaggggcctggactgaggctggggagggtggccatgacttagatgccagaatgagaagtgggagtactagggctctggagggcaggttcttcatctgcaaaagcaagaggatgatccccacttggccgggtctctgtgaggaggacatgggatcatgcatggaaagttcttagcccctgcgagggctcagcacccacccctcccccagcacttgcccttgcactgaacaggctatatagtaacaggtcatgataataaactgcaatcactgagggtatccatttcactgattcgtttttgtatggtcagtctcccccactgaggggtgggatggtgatctgctttctgctctgctgtctcctgagagatgaggttgtggtgcctgggacataaggggtgctcactaagcaggtgccaacccagggaatggaaatggcctggagctgtggcccctgcactgtctgggcccccaggactcagtgggctcactggatcccatgtgtgagccccagagggccaggctcagcatgttggactccttataggctgtggccaaacctttgtccctctctgacctctgccttctcctctccagaaggggcatctaaggctttccaggtgtaatggctcagggagtggctgtgccaggtgtacgggtgccctttgatgtcacctgtcacctcgctggtggctgcgctctcccttcctctcgctgctcctgtgtcttctcctccatctgccaaagtcaccatgccagggctgcccccagccccaatatccagtggaaaaacccagagaaatcacacaaatagaaaatatccacatcaacttgagaagctaagcctgcgcttgaggcagttcttggagcagcttctagcaggggcccagaccaacaccatcagcaaggagctgccgggggctcggccccctgaaggaggtttttatgactggccttagctgccctcctgaggctgacaagggctccactggggaacctctgggcaagtcggtggagggcccctcagcatcatctgggccttgctggcagcaaaagtgggtctcagaaaccaactcccatgagaggagccacctggatagagagtgggcagtgagagcaggacacaggttccaccacagagcagcagagacacccagaggctcctggtccatggtgcctgggg

SEQ ID NO: 493 - DNA, 1681 bp, Homo sapiens
gaacgccggtggcggggctggtagcccggcagccgcaggtggggccacgagcgctggctgagggaccgagccggagagccccggagcccccgtaacccgcgcggggagcgcccaggatgccgcgcggggactcggagcaggtgcgctactgcgcgcgcttctcctacctctggctcaagttttcacttatcatctattccaccgtgttctggctgattggggccctggtcctgtctgtgggcatctatgcagaggttgagcggcagaaatataaaacccttgaaagtgccttcctggctccagccatcatcctcatcctcctgggcgtcgtcatgttcatggtctccttcattggtgtgctggcgtccctccgtgacaacctgtaccttctccaagcattcatgtacatccttgggatctgcctcatcatggagctcattggtggcgtggtggccttgaccttccggaaccagaccattgacttcctgaacgacaacattcgaagaggaattgagaactactatgatgatctggacttcaaaaacatcatggactttgttcagaaaaagttcaagtgctgtggcggggaggactaccgagattggagcaagaatcagtaccacgactgcagtgcccctggacccctggcctgtggggtgccctacacctgctgcatcaggaacacgacagaagttgtcaacaccatgtgtggctacaaaactatcgacaaggagcgtttcagtgtgcaggatgtcatctacgtgcggggctgcaccaacgccgtgatcatctggttcatggacaactacaccatcatggcgggcatcctcctgggcatcctgcttccccagttcctgggggtgctgctgacgctgctgtacatcacccgggtggaggacatcatcatggagcactctgtcactgatgggctcctggggcccggtgccaagcccagcgtggaggcggcaggcacgggatgctgcttgtgctaccccaattagggcccagcctgccatggcagctccaacaaggaccgtctgggatagcacctctcagtcaacatcgtggggctggacagggctgcggcccctctgcccacactcagtactgaccaaagccagggctgtgtgtgcctgtgtgtaggtcccacggcctctgcctccccagggagcagagcctgggcctcccctaagaggctttccccgaggcagctctggaatctgtgcccacctggggcctggggaacaaggccctcctttctccaggcctgggctacgggggagggagagcctgaggctctgctcagggcccatttcatctctggcagtgccttggcggtggtattcaaggcagttttgtagcacctgtaattggggagagggagtgtgcccctcggggcaggagggaagggcatctggggaagggcaggagggaagagctgtccatgcagccacgcccatggccaggttggcctcttctcagcctcccaggtgccttgagccctcttgcaagggcggctgcttccttgagcctagtttttttacgtgatttttgtaacattcatttttttgtacagataacaggagtttctgactaatcaaagctggtatttccccgcatgtcttattcttgcccttcccccaaccagtttgttaatcaaacaataaaaacatgttttttt

SEQ ID NO: 494 - protein, 292 aa, Homo sapiens
MPRGDSEQVRYCARFSYLWLKFSLIIYSTVFWLIGALVLSVGIYAEVERQKYKTLESAFLAPAIILILLGVVMFMVSFIGVLASLRDNLYLLQAFMYILGICLIMELIGGVVTFRNQTIDFLNDNIRRGIENYYDDLDFKNIMDFVQKKFKCCGGEDYRDWSKNQYHDCSAPGPLACGVPYTCCIRNTTEVVNTMCGYKTIDKERFSVQDVIYVRGCTNAVIIWFMDNYTIMAGILLGILLPQFLGVLLTLLYITRVEDIIMEHSVTDGLLGPGAKPSVEAAGTGCCLCYPN
